United States Patent Application Publication US 2013/0036517 A1 - sequence listing, part 2

SEQ ID NO: 2922 - DNA, 1506 bp, Artificial Sequence
  Synthetic Construct, AT-79 intein modified protein encoding nucleic acids
atgcaaacaagcattactctgacatccaacgcatccggtacgtttgacggttactattacgaactctggaaggatactggcaatacaacaatgacggtctacactcaaggtcgcttttcctgccagtggtcgaacatcaataacgcgttgtttaggaccgggaagaaatacaaccagaattggcagtctcttggcacaatccggatcacgtactctgcgacttacaacccaaacgggaactcctacttgtgtatctatggctggtctaccaacccattggtcgagttctacatcgttgagtcctgggggaactggagaccgcctggtgcctgcgtggattacgagactgaggtcgtgctggggaatggggagcggaagaagatcggggagatcgtggagcgggctattgaggaggctgagaagaacggcaagctcgggcgggttgacgatggcttctacgctccgatcgacattgaggtctactcgctcgatctggagaccctcaaggttcggaaggcgcgggcaaatatcgcgtggaagcgcacagctccaaagaagatgatgctggtgaagactaggggcgggaagcgcattagggtcaccccgacgcaccccttcttcgttctggaggagggcaaggtggctatgaggaaggcccgggacctggaggagggcaacaagatcgccacgattgaggggctctccgtgagctgggacgaggtcgcggagatcctggagtacgagccaaaggatccttgggtctacgatctgcaggttccaggctaccacaacttcctcgctaatggcatcttcgttcataatacgtccctgggccaagtgacaatcgatggcgggacctacgacatctataggacgacacgcgtcaaccagccttccattgtggggacagccacgttcgatcagtactggagcgtgcgcacctctaagcggacttcaggaacagtgaccgtgaccgatcacttccgcgcctgggcgaaccggggcctgaacctcggcacaatagaccaaattacattgtgcgtggagggttaccaaagctctggatcagccaacatcacccagaacaccttctctcagggctcttcttccggcagttcgggtggctcatccggctccacaacgactactcgcatcgagtgtgagaacatgtccttgtccggaccctacgttagcaggatcaccaatccctttaatggtattgcgctgtacgccaacggagacacagcccgcgctaccgttaacttccccgcaagtcgcaactacaatttccgcctgcggggttgcggcaacaacaataatcttgcccgtgtggacctgaggatcgacggacggaccgtcgggaccttttattaccagggcacatacccctgggaggccccaattgacaatgtttatgtcagtgcggggagtcatacagtcgaaatcactgttactgcggataacggcacatgggacgtgtatgccgactacctggtgatacagtga

SEQ ID NO: 2923 - DNA, 1818 bp, Artificial Sequence
  Synthetic Construct, AT-80 intein modified protein encoding nucleic acids
atgcaaacaagcattactctgacatccaacgcatccggtacgtttgacggttactattacgaactctggaaggatactggcaatacaacaatgacggtctacactcaaggtcgcttttcctgccagtggtcgaacatcaataacgcgttgtttaggaccgggaagaaatacaaccagaattggcagtctcttggcacaatccggatcacgtactctgcgacttacaacccaaacgggaactcctacttgtgtatctatggctggtctaccaacccattggtcgagttctacatcgttgagtcctgggggaactggagaccgcctggtgcctgcgtcgcgcctgagacactgattattactgagaatgggacaaaggagatcggggaggtcgtggagcggtggatgaaggagctgggcgagatcgagtacgacgatggcatttcgtactctccggccttcgagaaggttgcgtccctgaacggcgggaaggtgaagatgctcccggtccgcagggtttggaagctgaggagcccaggcaagatgatcaagattcgctcagagtccgggaagcagatcaccgtcacgccagagacaaagctcctgactatcattgacggctcgctggagtgggtggaggctcgcaagctgaagaaggggaactacgttgcggtggtcaataaggagaggagcatcgtgcctattggcgacttcctcgctaagctcctgaagttctacggggtcgagctgaacctcaatgaggctgttgagcgcgaccaggccaggaagctcctggagaccctgaagtctaagggcctctcagatgtcacgatcgagattccagagaagctccggcgcttcatcaagtgcgaccgcgtgcgctacgtggatctggttgagatgctctccagcatggagggcgagctgaaggaggaggtcatgctcctgctctccgacgtgggggatatccacgaggtcattcaggagcggctgaaggagatcggcaagattctggagagcgacgcgtcgtgggagaggatcgctgaggtggaggaggttgtgcgggatggccatgtctacgatctcacagtggagggctctcattctttcattgctaatggcttcgtggttcataacacgtccctgggccaagtgacaatcgatggcgggacctacgacatctataggacgacacgcgtcaaccagccttccattgtggggacagccacgttcgatcagtactggagcgtgcgcacctctaagcggacttcaggaacagtgaccgtgaccgatcacttccgcgcctgggcgaaccggggcctgaacctcggcacaatagaccaaattacattgtgcgtggagggttaccaaagctctggatcagccaacatcacccagaacaccttctctcagggctcttcttccggcagttcgggtggctcatccggctccacaacgactactcgcatcgagtgtgagaacatgtccttgtccggaccctacgttagcaggatcaccaatccctttaatggtattgcgctgtacgccaacggagacacagcccgcgctaccgttaacttccccgcaagtcgcaactacaatttccgcctgcggggttgcggcaacaacaataatcttgcccgtgtggacctgaggatcgacggacggaccgtcgggaccttttattaccagggcacatacccctgggaggccccaattgacaatgtttatgtcagtgcggggagtcatacagtcgaaatcactgttactgcggataacggcacatgggacgtgtatgccgactacctggtgatacagtga

SEQ ID NO: 2924 - DNA, 2196 bp, Artificial Sequence
  Synthetic Construct, AT-81 intein modified protein encoding nucleic acids
atgcaaacaagcattactctgacatccaacgcatccggtacgtttgacggttactattacgaactctggaaggatactggcaatacaacaatgacggtctacactcaaggtcgcttttcctgccagtggtcgaacatcaataacgcgttgtttaggaccgggaagaaatacaaccagaattggcagtctcttggcacaatccggatcacgtactctgcgacttacaacccaaacgggaactcctacttgtgtatctatggctggtctaccaacccattggtcgagttctacatcgttgagtcctgggggaactggagaccgcctggtgcctgcctcctccctgatgagaaggtcgtggttccctcggtcgggttcgtgacactcaaggagctgttcgagacggcttccaaggtcgtggagcgcgacgatgagaaggagatcagggagctcgacgagcggattaccagcgttaacggcgatgggaagacgggcctggtcaaggcctcctacgtgtggaaggttaggcacaagggcaaggtcatccgggtcaagctcaagaattggcacggcgttacagtgactccggagcatcccttcctcaccacgaaggggtggaagagggctgaccagctgaggccaggcgattacgtcgcggttcctaggttcatccatggcaacgaggacgagaagattttcctctcctacgtgaaggtcaagaagtctggcgaggagtggaaggagtacttctacctggcgggcaggaaggggaacatcgatgtcaatctcctgttcgttgctccaaagcgctacgtggtcgagttcctccgggggtacttcgaggagcgctccgaggtcaagggcgagagcgttatcgtggaggctcgggagctggtggagcctctcagcctggctctcctgaggttcggcatcttctctaagattcaggggtcaaagctcatcgtcaccggcaagcgcaacctggaggccttcaaggactacattggcttcaaggatgagagggagaaggccctggaggaggcgatcgagaaggtgaagggctccgaggtctacccgatcttcgaggagattcgcaggctccgcctcctgttcgggttcacaagggaggagctgggctcatacgctaagtacgagaactccgaggccccgacttacgaggagctcatggagatcctggacttcattgagagggggtcccccagcctctcgaagaagatcgcgattctggagggcaagctgaaggctgagctcagggtgctggaggaggagggcctgatcaaggacgggaagctcaccccactgggcagggagctcctggaggtctggcggaaccgcgagttcgattccaaggacgtcgattacatccggaacattgcggagacgctggtgttcatccccgttgagaatgtggaggaggaggagtacgacggctacgtttacgatctcactacggagactcataacttcattgctaatggcatcctcgttcataatacgtccctgggccaagtgacaatcgatggcgggacctacgacatctataggacgacacgcgtcaaccagccttccattgtggggacagccacgttcgatcagtactggagcgtgcgcacctctaagcggacttcaggaacagtgaccgtgaccgatcacttccgcgcctgggcgaaccggggcctgaacctcggcacaatagaccaaattacattgtgcgtggagggttaccaaagctctggatcagccaacatcacccagaacaccttctctcagggctcttcttccggcagttcgggtggctcatccggctccacaacgactactcgcatcgagtgtgagaacatgtccttgtccggaccctacgttagcaggatcaccaatccctttaatggtattgcgctgtacgccaacggagacacagcccgcgctaccgttaacttccccgcaagtcgcaactacaatttccgcctgcggggttgcggcaacaacaataatcttgcccgtgtggacctgaggatcgacggacggaccgtcgggaccttttattaccagggcacatacccctgggaggccccaattgacaatgtttatgtcagtgcggggagtcatacagtcgaaatcactgttactgcggataacggcacatgggacgtgtatgccgactacctggtgatacagtga

SEQ ID NO: 2925 - DNA, 1602 bp, Artificial Sequence
  Synthetic Construct, AT-82 intein modified protein encoding nucleic acids
atgcaaacaagcattactctgacatccaacgcatccggtacgtttgacggttactattacgaactctggaaggatactggcaatacaacaatgacggtctacactcaaggtcgcttttcctgccagtggtcgaacatcaataacgcgttgtttaggaccgggaagaaatacaaccagaattggcagtctcttggcacaatccggatcacgtactctgcgacttacaacccaaacgggaactcctacttgtgtatctatggctggtctaccaacccattggtcgagttctacatcgttgagtcctgggggaactggagaccgcctggtgccgcgctctactacttctctgagattcagctccctaacggcaaggagttcatcggcaagctcgtggatgagctgttcgagaagtaccatgacaagatcggcaagtacaaggatatggagtatgtggagctcaacgaggaggacacattcgaggtcatctcaattgggccagatctgtccgctaggaggcacaaagtgactcatgtctggcggcgcaaggttaaggacggcgagaagctcgtgaagatcaggaccgctagcgggaaggagctcgtgctgacgcaggaccacccggttttcgtgctcctgggcagggacgtcgctaggagggatgctggcaacgtcaaggttggggacgagattgcggtgctcaatacgcggcccgatttctcggtcctgtctccgcccgctatgccagagctcctgtctgagcctttcaattacgagctgtccagcatcggcgacgtcgcttgggatgaggtggtcgaggttgacgagattgatgccaagggcctcggggtggagtacctgtacgatctcacagtggatatcaatcataactacgttgctaatggcattgtcgtttctaatacgtccctgggccaagtgacaatcgatggcgggacctacgacatctataggacgacacgcgtcaaccagccttccattgtggggacagccacgttcgatcagtactggagcgtgcgcacctctaagcggacttcaggaacagtgaccgtgaccgatcacttccgcgcctgggcgaaccggggcctgaacctcggcacaatagaccaaattacattgtgcgtggagggttaccaaagctctggatcagccaacatcacccagaacaccttctctcagggctcttcttccggcagttcgggtggctcatccggctccacaacgactactcgcatcgagtgtgagaacatgtccttgtccggaccctacgttagcaggatcaccaatccctttaatggtattgcgctgtacgccaacggagacacagcccgcgctaccgttaacttccccgcaagtcgcaactacaatttccgcctgcggggttgcggcaacaacaataatcttgcccgtgtggacctgaggatcgacggacggaccgtcgggaccttttattaccagggcacatacccctgggaggccccaattgacaatgtttatgtcagtgcggggagtcatacagtcgaaatcactgttactgcggataacggcacatgggacgtgtatgccgactacctggtgatacagtga

SEQ ID NO: 2926 - DNA, 2013 bp, Artificial Sequence
  Synthetic Construct, AT-83 intein modified protein encoding nucleic acids
atgcaaacaagcattactctgacatccaacgcatccggtacgtttgacggttactattacgaactctggaaggatactggcaatacaacaatgacggtctacactcaaggtcgcttttcctgccagtggtcgaacatcaataacgcgttgtttaggaccgggaagaaatacaaccagaattggcagtctcttggcacaatccggatcacgtactctgcgacttacaacccaaacgggaactcctacttgtgtatctatggctggtctaccaacccattggtcgagttctacatcgttgagtcctgggggaactggagaccgcctggtgcctgcttcagcggggaggagacagtcgttattcgggagaatggggaggtcaaggtgctcaggctcaaggatttcgtggagaaggctctggagaagccaagcggcgaggggctggacggcgatgtgaaggtggtctaccacgacttccgcaacgagaatgtcgaggttctcaccaaggatggcttcacgaagctcctgtacgctaacaagaggatcgggaagcagaagctccgcagggttgtgaatctggagaaggactactggttcgctctcacccccgaccataaggtctacaccacggatggcctgaaggaggccggggagatcacagagaaggacgagctcatctctgtcccaattactgttttcgattgcgaggacgaggatctgaagaagatcggcctcctgcctctcacctcggacgatgagcggctgcgcaagatcgccacgctcatgggcattctgttcaacggcgggtctatcgacgagggcctcggggtgctcacactgaagtccgagaggagcgttatcgagaagttcgtgattaccctcaaggagctgttcggcaagttcgagtacgagatcattaaggaggagaacacaatcctgaagactagggacccgcggatcattaagttcctcgtcggcctgggggctccaattgagggcaaggatctcaagatgccatggtgggttaagctgaagccttcactcttcctggccttcctggagggcttccgggctcacatcgtggagcagctggtcgacgatccgaacaagaatctccccttcttccaggagctgtcctggtacctcggcctgttcgggatcaaggcggacattaaggttgaggaagtgggcgacaagcataagatcattttcgatgctgggcgcctcgacgtcgataagcagttcatcgagacgtgggaggacgtggaggtcacctacaacctcactacggagaagggcaatctgctcgccaatgggctcttcgttaagaacacgtccctgggccaagtgacaatcgatggcgggacctacgacatctataggacgacacgcgtcaaccagccttccattgtggggacagccacgttcgatcagtactggagcgtgcgcacctctaagcggacttcaggaacagtgaccgtgaccgatcacttccgcgcctgggcgaaccggggcctgaacctcggcacaatagaccaaattacattgtgcgtggagggttaccaaagctctggatcagccaacatcacccagaacaccttctctcagggctcttcttccggcagttcgggtggctcatccggctccacaacgactactcgcatcgagtgtgagaacatgtccttgtccggaccctacgttagcaggatcaccaatccctttaatggtattgcgctgtacgccaacggagacacagcccgcgctaccgttaacttccccgcaagtcgcaactacaatttccgcctgcggggttgcggcaacaacaataatcttgcccgtgtggacctgaggatcgacggacggaccgtcgggaccttttattaccagggcacatacccctgggaggccccaattgacaatgtttatgtcagtgcggggagtcatacagtcgaaatcactgttactgcggataacggcacatgggacgtgtatgccgactacctggtgatacagtga

SEQ ID NO: 2927 - DNA, 2379 bp, Artificial Sequence
  Synthetic Construct, AT-84 intein modified protein encoding nucleic acids
atgcaaacaagcattactctgacatccaacgcatccggtacgtttgacggttactattacgaactctggaaggatactggcaatacaacaatgacggtctacactcaaggtcgcttttcctgccagtggtcgaacatcaataacgcgttgtttaggaccgggaagaaatacaaccagaattggcagtctcttggcacaatccggatcacgtactctgcgacttacaacccaaacgggaactcctacttgtgtatctatggctggtctaccaacccattggtcgagttctacatcgttgagtcctgggggaactggagaccgcctggtgcctgcttcccccctactgaggaggcggttttcaagttcggggataaggttaagatcgctactttcgaggaggtcgctaagaatttcaagttcgagcacaaggtcgagatcgacggcttcaagggggagtacagcattcccaacgacctctacgtgctgaccttcaatgatggcaaggccgagtggacccgggtcacgaagttcctccgcaggaagcacgaggggaagatccgcgtcattaagaccaagacgggcaggacgatcaggaccacgccagagcataagttcttcgtttacaaggacggggagctggtgaagaagagggctgacgagctggagccaggcgatgagctggtgctcctgtggcggttcgagtccgaggagacactcactgagatcaacctcctggaggctttcaaggacctgccacaggaggagaaggagaaggtctacgttcgggggattaaggacctcgatctgacgcctctcaaggagaagtacggcgacaaggtctactactgggcgaggcaggattcgatgccgctctctgtgttctacgagctcaacgtcgacctggataaggagttcaggctgggccgggacgctacaacttacgagctcccatctaagctgaagatcacaccttcactcgccaagctgattggctacttcgtgtcagacgggaactactccgacaaggatctccgcatcactgtgggccacgaggatgtcgagaaggagatcgttaatattctggaggagctcggcctgccatactcgttcctggagtgggaggggaagaccaagcagatcgttattggctctcgcctcctgaggctggtcttcaagcatgttttcaagatcccagagggggctccaaacaagaggctcccggagggcttcctgtccttccccttcgaggctaaggtggctctcctgagcggcctcttcaatggcgacggctacgtggtgcgcggcgagcaccatctgtcgatcgggtacgcgtccacaagcaagggcctcatcagggatattctgtacctcctggcttccctgggcattttcgcccgggtgtaccgcgtccctaaggagaagatgaagggggccaaccacgacctctacaagctgtacatcgcgggcaccgatctcgttcgcctggtggagctcctggagctcagggagggccatcgggagaagctgggcgagatcgggaatcgcaagccggcgagggtgaagaagatcgctgacttctacattgacgttgtggatgaggtcagcgaggaggagtactcgggctacgtttacgatctggaggtggagaatgaggggcatagcttcgttgctgcggatggcatcctcgtttcaaatacgtccctgggccaagtgacaatcgatggcgggacctacgacatctataggacgacacgcgtcaaccagccttccattgtggggacagccacgttcgatcagtactggagcgtgcgcacctctaagcggacttcaggaacagtgaccgtgaccgatcacttccgcgcctgggcgaaccggggcctgaacctcggcacaatagaccaaattacattgtgcgtggagggttaccaaagctctggatcagccaacatcacccagaacaccttctctcagggctcttcttccggcagttcgggtggctcatccggctccacaacgactactcgcatcgagtgtgagaacatgtccttgtccggaccctacgttagcaggatcaccaatccctttaatggtattgcgctgtacgccaacggagacacagcccgcgctaccgttaacttccccgcaagtcgcaactacaatttccgcctgcggggttgcggcaacaacaataatcttgcccgtgtggacctgaggatcgacggacggaccgtcgggaccttttattaccagggcacatacccctgggaggccccaattgacaatgtttatgtcagtgcggggagtcatacagtcgaaatcactgttactgcggataacggcacatgggacgtgtatgccgactacctggtgatacagtga

SEQ ID NO: 2928 - DNA, 1569 bp, Artificial Sequence
  Synthetic Construct, AT-85 intein modified protein encoding nucleic acids
atgcaaacaagcattactctgacatccaacgcatccggtacgtttgacggttactattacgaactctggaaggatactggcaatacaacaatgacggtctacactcaaggtcgcttttcctgccagtggtcgaacatcaataacgcgttgtttaggaccgggaagaaatacaaccagaattggcagtctcttggcacaatccggatcacgtactctgcgacttacaacccaaacgggaactcctacttgtgtatctatggctggtctaccaacccattggtcgagttctacatcgttgagtcctgggggaactggagaccgcctggtgcctgcttcccaggcgatacacgcattctcgttcagattgacggggttcctcagaagattactctcagggagctctacgagctgttcgaggatgagcgctacgagaacatggtttacgtgcgcaagaagccgaagagggagatcaaggtgtacagcattgacctggagacaggcaaggtggtcctgactgacatcgaggatgtcattaaggccccagcgacggaccacctcatcaggttcgagctggaggatgggcggtctttcgagaccacggtggaccatcctgtcctcgtttacgagaacggccggttcatcgagaagcgcgctttcgaggtcaaggagggggacaaggtgctggtctcagagctggagctggttgagcagtccagctcgtctcaggataatccgaagaacgagaatctcggctccccagagcacgaccagctcctggagatcaagaacatcaagtatgtgcgcgcgaatgacgatttcgtgttctcgctcaatgctaagaagtaccacaacgtcatcatcaatgagaacatcgttacacatcagacgtccctgggccaagtgacaatcgatggcgggacctacgacatctataggacgacacgcgtcaaccagccttccattgtggggacagccacgttcgatcagtactggagcgtgcgcacctctaagcggacttcaggaacagtgaccgtgaccgatcacttccgcgcctgggcgaaccggggcctgaacctcggcacaatagaccaaattacattgtgcgtggagggttaccaaagctctggatcagccaacatcacccagaacaccttctctcagggctcttcttccggcagttcgggtggctcatccggctccacaacgactactcgcatcgagtgtgagaacatgtccttgtccggaccctacgttagcaggatcaccaatccctttaatggtattgcgctgtacgccaacggagacacagcccgcgctaccgttaacttccccgcaagtcgcaactacaatttccgcctgcggggttgcggcaacaacaataatcttgcccgtgtggacctgaggatcgacggacggaccgtcgggaccttttattaccagggcacatacccctgggaggccccaattgacaatgtttatgtcagtgcggggagtcatacagtcgaaatcactgttactgcggataacggcacatgggacgtgtatgccgactacctggtgatacagtga

SEQ ID NO: 2929 - DNA, 2511 bp, Artificial Sequence
  Synthetic Construct, AT-86 intein modified protein encoding nucleic acids
atgcaaacaagcattactctgacatccaacgcatccggtacgtttgacggttactattacgaactctggaaggatactggcaatacaacaatgacggtctacactcaaggtcgcttttcctgccagtggtcgaacatcaataacgcgttgtttaggaccgggaagaaatacaaccagaattggcagtctcttggcacaatccggatcacgtactctgcgacttacaacccaaacgggaactcctacttgtgtatctatggctggtctaccaacccattggtcgagttctacatcgttgagtcctgggggaactggagaccgcctggtgcctgcctgacgggggacgctaaggttatcgctaatggggagctgacaacgatcggggagctggtggagcgcatctcaaatggcaagctgggcccaacccccgtccggggcctcacggttctggggatcgacgaggatggcaagctcgtggagctgccagtcgagtatgtgtacaaggacaagaccagcgagctggtcaagatcaggacgaggctcggcagggagctgaaggttaccccataccaccctctcctggtgaaccgcaggaatgggaagatcgagtgggtgaaggctgaggagctgaagccaggcgacaggctcgctattccgtccttcctccccgccatgctgaacgataatcctctcgctgagtggctgggctacttcttcggcaacgggtacacagacagcgaggagcgcgtggtcttcgagtctaagtcaaaggagctcaggaagcggttcatggagctcactaggaagctgttccaggacgccgagatcaaggaggattccggcaaggtttacgtgtccagctcggaggttaagcgcctcgtgaagtcactgaacaaggattccatcccagagcaggcttggaaggggctcaggagcttcctgagggcgtacttcgactgcaatgctgagatcaaggataagatcattgtgtctacggctggcaaggagatcgccgagcagatttcatacgctctcgctggcctggggatcgtggctgaggtcgacgataaggggtcggtcatcatttctgacccggagaacgtttctaggttcctggatgagatcggcttctcagtcgaggagaagaaggaggaggctaaggccctgattaagaagtcgaccctcaacctgggcatctacgtggacaaggagctcatttcctacgtccgggagaagctcaagctgagcttctacgagaatgagacgatgtggtcgccagagaaggcccgcgagatcgcgtggaagctgatgaaggagatctactaccggctcgacgagctggagcgcttcaagaaggcgctctccaagagcgtgatcattgattggtcggaggtcgagaagaagaaggaggagatcagcgagaagacagggatctcggtgaacgagattctggagtacgccaagggcaagaggaagccgtctctggaggagtatgtgaagatcgcgaaggctctcggcgtggagctgaaggagacactggaggcgattttcactttcgggaagaagtacctgggctacgtgatctccgacgagattgagaccctggaggaggtcaggaaggaggagctcaagcggctgaaggagctcctgaacgacgagaagctgaagaagggggtcgcctacctcatcttcctggcgcagaatgagctcctgtgggatgagatcattgaggtcgagaagctcaagggcgacttcgttatctacgatctgcatgttccaaagtaccacaacttcatcgggggcaatctgccaactgttctgcataatacgtccctgggccaagtgacaatcgatggcgggacctacgacatctataggacgacacgcgtcaaccagccttccattgtggggacagccacgttcgatcagtactggagcgtgcgcacctctaagcggacttcaggaacagtgaccgtgaccgatcacttccgcgcctgggcgaaccggggcctgaacctcggcacaatagaccaaattacattgtgcgtggagggttaccaaagctctggatcagccaacatcacccagaacaccttctctcagggctcttcttccggcagttcgggtggctcatccggctccacaacgactactcgcatcgagtgtgagaacatgtccttgtccggaccctacgttagcaggatcaccaatccctttaatggtattgcgctgtacgccaacggagacacagcccgcgctaccgttaacttccccgcaagtcgcaactacaatttccgcctgcggggttgcggcaacaacaataatcttgcccgtgtggacctgaggatcgacggacggaccgtcgggaccttttattaccagggcacatacccctgggaggccccaattgacaatgtttatgtcagtgcggggagtcatacagtcgaaatcactgttactgcggataacggcacatgggacgtgtatgccgactacctggtgatacagtga

SEQ ID NO: 2930 - DNA, 2838 bp, Artificial Sequence
  Synthetic Construct, AT-87 intein modified protein encoding nucleic acids
atgcaaacaagcattactctgacatccaacgcatccggtacgtttgacggttactattacgaactctggaaggatactggcaatacaacaatgacggtctacactcaaggtcgcttttcctgccagtggtcgaacatcaataacgcgttgtttaggaccgggaagaaatacaaccagaattggcagtctcttggcacaatccggatcacgtactctgcgacttacaacccaaacgggaactcctacttgtgtatctatggctggtctaccaacccattggtcgagttctacatcgttgagtcctgggggaactggagaccgcctggtgcctgcgttacaggggacacaaaggtctacacgcctgatgagcgggaggttaagattagggatttcatgaattacttcgagaatgggctgatcaaggaggtgtctaatcgcatcgggagggacacagtcattgccgcggtttccttcaacagccgcatcgtgggccacccagtctacaggctcactctggagtccgggaggatcattgaggccactggcgaccacatgttcctcacccctgaggggtggaagcagacgtacgatatcaaggagggcagcgaggtcctcgttaagccaaccctggagggcacgccttacgagccagaccccagggtcatcattgatatcaaggagttctacaacttcctggagaagatcgagcgcgagcacaacctcaagccactgaaggaggcgaagacgttcagggagctcatcacaaaggacaaggagaagattctgaggagggctctggagctgagggctgagatcgagaacggcctgaccaagcgggaggcggagatcctggagctgatttctgctgatacgtggatccctcgcgctgagctggagaagaaggccaggatctcaaggacccggctgaatcagattctccagcggctggagaagaaggggtacatcgagcggcgcattgagggccgcaagcagttcgtgcggaagatccgcaatggcaagattctccggaacgccatggacatcaagcgcattctggaggaggagttcggcatcaagatttcatacaccacggtcaagaagctcctgtccgggaacgttgatggcatggcgtaccgcatcctcaaggaggtcaaggagaagtggctggttcgctacgacgatgagaaggcggggatcctggctagggtggtcggcttcattctcggcgacgggcacctggctaggaatggccggatctggttcaactccagcaaggaggagctggagatgctggctaacgacctccggaagctcggcctgaagccgtcggagatcattgagcgcgattcgtcttcagagatccaggggcggaaggtgaagggccgcatctacatgctctacgtggacaatgctgccttccatgccctcctgaggttctggaaggtggaggtcgggaacaagaccaagaagggctacacggttccggagtggatcaagaagggcaatctcttcgtcaagagggagttcctcaggggcctgttcggggctgacggcaccaagccctgcgggaagcgctacaacttcaatggcatcaagctggagattcgggctaagaaggagtccctggagcgcacggtggagttcctgaacgacgtcgccgatctcctgagggagttcgacgttgattcgaagatcacagtgtctccgactaaggagggcttcatcattaggctcatcgtgacacccaacgacgccaattacctcaacttcctgacacgggtggggtacgcctacgcgaaggatacttacgccaggctcgtcggcgagtacatccggattaagctcgcgtacaagaacatcattctgcccggcatcgctgagaaggccattgagctggcgacagtcactaacagcacgtacgcggctaaggttctcggcgtgtcgagggacttcgttgtgaatcggctgaaggggacacagatcggcattactagggatttcatgaccttcgaggagttcatgaaggagcgggtgctgaacggctacgtgatcgagaaggtcatcaagaaggagaagctcggctacctggacgtctacgacgttacttgcgctcgggatcatagcttcatttccaatgggctcgtttctcataatacgtccctgggccaagtgacaatcgatggcgggacctacgacatctataggacgacacgcgtcaaccagccttccattgtggggacagccacgttcgatcagtactggagcgtgcgcacctctaagcggacttcaggaacagtgaccgtgaccgatcacttccgcgcctgggcgaaccggggcctgaacctcggcacaatagaccaaattacattgtgcgtggagggttaccaaagctctggatcagccaacatcacccagaacaccttctctcagggctcttcttccggcagttcgggtggctcatccggctccacaacgactactcgcatcgagtgtgagaacatgtccttgtccggaccctacgttagcaggatcaccaatccctttaatggtattgcgctgtacgccaacggagacacagcccgcgctaccgttaacttccccgcaagtcgcaactacaatttccgcctgcggggttgcggcaacaacaataatcttgcccgtgtggacctgaggatcgacggacggaccgtcgggaccttttattaccagggcacatacccctgggaggccccaattgacaatgtttatgtcagtgcggggagtcatacagtcgaaatcactgttactgcggataacggcacatgggacgtgtatgccgactacctggtgatacagtga

SEQ ID NO: 2931 - DNA, 2211 bp, Artificial Sequence
  Synthetic Construct, AT-88 intein modified protein encoding nucleic acids
atgcaaacaagcattactctgacatccaacgcatccggtacgtttgacggttactattacgaactctggaaggatactggcaatacaacaatgacggtctacactcaaggtcgcttttcctgccagtggtcgaacatcaataacgcgttgtttaggaccgggaagaaatacaaccagaattggcagtctcttggcacaatccggatcacgtactctgcgacttacaacccaaacgggaactcctacttgtgtatctatggctggtctaccaacccattggtcgagttctacatcgttgagtcctgggggaactggagaccgcctggtgcctgcatcgatggcaacgctaagattattttcgagaatgagggggaggagcatctgacaactatggctgagatgtacgagcgctaccgccacctcggcgagttctacgacgagaactacaatcgctgggggattgatgtgtccagcgtcccgatctacgtgaagtccttcgacccagagacgaggagggtggtcaagggcagggtccgggccatctggaagtacgagctgggcgaggagattccgaagtacgagatccgcacacacaagggcactaagattctcaccagcccatggcatcctttcttcgtcctgacaccagacttcgaggttatcgagaagagggcggacgagctcaaagtgggcgatatcctgattggcgggatgcctgacggggaggatcacgagctcattttcgactactggctggctggcttcatcgctggcaacgggaatctcgacgattcggagagggagtacaaggcccgcgagctcctggatggcatcgagaacgggattccgcccaagatcctgaggaagggcaagaatgccgtcctctctttcatcacgggcctgttcgacgctgaggggcacgttaacgataagtcaggcattgagctcgggatggtgaataagaagctgatcgaggctgtcacacattacctcaacagcctgggcatcaaggcccgcatgagggagaagcggcgcaagaatggcatcgactacattatgcacgtggaggagtactcgtctctcctgcggttctacgagctcattggcaagcatctgcagaacaatgagaagaaggagaagctggagatcctcctgcacaagcataacggcggggcgttcgatctctcactgaacttcaatgctttcaaggagtgggcctccaggtacggcgtcgagttcaagaccaacgggaatcagatcctcgctatcattggcaacgagaaggttagcctgggccagtggcacgcgagggggcatgtgtcgaaggctgtcctggttaagatgctccggaagctgtacgaggttactaagaacgacgaggtgaaggagatgctccacctgatcgagtccctggaggttgtgaaggagatcaccattacgaacgagcccaagaccttctacgatctgacagtggataagtaccagaactacctcgccggggagaatggcatgattttcgtgcataatacgtccctgggccaagtgacaatcgatggcgggacctacgacatctataggacgacacgcgtcaaccagccttccattgtggggacagccacgttcgatcagtactggagcgtgcgcacctctaagcggacttcaggaacagtgaccgtgaccgatcacttccgcgcctgggcgaaccggggcctgaacctcggcacaatagaccaaattacattgtgcgtggagggttaccaaagctctggatcagccaacatcacccagaacaccttctctcagggctcttcttccggcagttcgggtggctcatccggctccacaacgactactcgcatcgagtgtgagaacatgtccttgtccggaccctacgttagcaggatcaccaatccctttaatggtattgcgctgtacgccaacggagacacagcccgcgctaccgttaacttccccgcaagtcgcaactacaatttccgcctgcggggttgcggcaacaacaataatcttgcccgtgtggacctgaggatcgacggacggaccgtcgggaccttttattaccagggcacatacccctgggaggccccaattgacaatgtttatgtcagtgcggggagtcatacagtcgaaatcactgttactgcggataacggcacatgggacgtgtatgccgactacctggtgatacagtga

SEQ ID NO: 2932 - DNA, 2328 bp, Artificial Sequence
  Synthetic Construct, AT-89 intein modified protein encoding nucleic acids
atgcaaacaagcattactctgacatccaacgcatccggtacgtttgacggttactattacgaactctggaaggatactggcaatacaacaatgacggtctacactcaaggtcgcttttcctgccagtggtcgaacatcaataacgcgttgtttaggaccgggaagaaatacaaccagaattggcagtctcttggcacaatccggatcacgtactctgcgacttacaacccaaacgggaactcctacttgtgtatctatggctggtctaccaacccattggtcgagttctacatcgttgagtcctgggggaactggagaccgcctggtgcctgcttcacaggggacactcgcatcctgacggagaaggggctgattcctattgaggagatcgtgcatgagacgggcaagaagccaaaggtggtcacacacgctggcctcaaggacatcattgagacttacgataacggggagatggaggttttccgcgtgaccacggaggacggctacgagctcaaggtgaccggggaccataagttcctggtcttcgatgagaacggcaatccaacgctcaagcctctgaaggagctcaaagtgggggactacgtctacatcctggctccagagtggaagggcggggagtatgtggagctcgatacaaacatcgagctgaagggcaaggggtacaacgttaatctgccctcgaagctcgacgagaagctggcgtacctcctgggcatcatctacgctgatgggcacatccgccattacttcgagaacggcaagcgcaagaactccaagatcgagatctacctccaccaggacgagaccgagatcaaggagaaggtgaagaggtacttcaaggagatcttcggcattgagccaaaggagttcctcaaggaggagcagcataaggtcatcctggttattccttccacgaagattgtcaagttcctggagatcaacggcctcctgaaggacaagagcgagaatattcgggttccggaggctatcttccgctcccgcccatctgtgatcgctgcgttcctggctggcttcttcgacggcgatgggtcgatcgatcagaactaccggatcgccttcaagtccattagccgcgagttcatcaaggaggctcagctcctgttcctcgccctgggcatcgtgacatccattcaggagtacaacccgcccaatccaaacaataagacagtttacactctccgggtgcagactcgcgacatgaagatcaaggcgttcaacgtcctcaaggagagcgttaagctgtcgaagattatgaaggaggctatctctaagctggaggagaacggcaagaataagaagttctcattcccgttcaacgccatctaccacattaaggaccccaagatcagggcgaagattcagcgggattacaagatcctctcatacaattccaaggtgacccatagggccttcatcaacaatattctcaagctgaaggaggagctcggcctggacgatgaggaggtcaagtacttcgagatgctgagcaagctctacccaaccaagatcacgaagattgagcctctggggaaggcgcacgtctacgatctccaggttgaggatgttcatctgctcacaggcaatggcatctacacaagcaatacgtccctgggccaagtgacaatcgatggcgggacctacgacatctataggacgacacgcgtcaaccagccttccattgtggggacagccacgttcgatcagtactggagcgtgcgcacctctaagcggacttcaggaacagtgaccgtgaccgatcacttccgcgcctgggcgaaccggggcctgaacctcggcacaatagaccaaattacattgtgcgtggagggttaccaaagctctggatcagccaacatcacccagaacaccttctctcagggctcttcttccggcagttcgggtggctcatccggctccacaacgactactcgcatcgagtgtgagaacatgtccttgtccggaccctacgttagcaggatcaccaatccctttaatggtattgcgctgtacgccaacggagacacagcccgcgctaccgttaacttccccgcaagtcgcaactacaatttccgcctgcggggttgcggcaacaacaataatcttgcccgtgtggacctgaggatcgacggacggaccgtcgggaccttttattaccagggcacatacccctgggaggccccaattgacaatgtttatgtcagtgcggggagtcatacagtcgaaatcactgttactgcggataacggcacatgggacgtgtatgccgactacctggtgatacagtga

SEQ ID NO: 2933 - DNA, 2160 bp, Artificial Sequence
  Synthetic Construct, AT-90 intein modified protein encoding nucleic acids
atgcaaacaagcattactctgacatccaacgcatccggtacgtttgacggttactattacgaactctggaaggatactggcaatacaacaatgacggtctacactcaaggtcgcttttcctgccagtggtcgaacatcaataacgcgttgtttaggaccgggaagaaatacaaccagaattggcagtctcttggcacaatccggatcacgtactctgcgacttacaacccaaacgggaactcctacttgtgtatctatggctggtctaccaacccattggtcgagttctacatcgttgagtcctgggggaactggagaccgcctggtgcctgcgtggtcggggagacaaggattctgacgcctgagggctacatcaaggctgaggagctgttcaagctcgccaaggagcggggcaagatggaggccatcgctgtggagggcattgctgagggcggggagccatacgcgtactctctggagatcctcctgcctggcgacaagcaggtcaagtacgagaccgttcacgggaacgctgtggaggtcgccgatccggtttcagtgcccgcctacgtgtggaaggtcggcatgaaggaggttgcccgcgtgaggacaaaggagggctacgagatcaccgccacgctcgaccataagctgatgactccggagggctggaaggagatcaaggacctgaagccaggggataagattctcctgcctaggttcgaggtggaggaggacttcggctccgagagcatcggggaggatctcgcgttcgtcctgggctggttcattggcgacgggtacctcaacgttaaggataagcgggcgtggttctacttcaatgctgagaaggaggaggagatcgcctggaagatccgcgagattctggctaagaggttcgagatcaaggccgagccacaccgctacggcaaccagattaagctcggcgtcagggggaaggcgtacgagtggctggagtccatcgttaagaccaacgagaagaggatcccggagattgtgtaccggctcaagcccaatgagattgcctcattcctcaggggcctgttctccgctgacggctacgtggacaatgatatggctatccgcctcacgtcgaagtctcgggagctcctgcgcgaggtccaggatctcctgctcctgttcggcatcctgtccaagatctacgagaggccgtacaagcgggagttcaagtacaccacgaaggacggcgaggagcgcacatacacaactgaggggtactacgagctcgtgatcgcgaactactcccggaagatcttcgctgagcgcattggcctggaggggtacaagatggagaagctcagcctggagaagatcaaggtcgacgagcccattgtcaccgttgagtcggtggagatcctcggcaagaagctggtctacgacttcactgttccagagcatcacatgtacatttccaatgggttcatgagccacaacacgtccctgggccaagtgacaatcgatggcgggacctacgacatctataggacgacacgcgtcaaccagccttccattgtggggacagccacgttcgatcagtactggagcgtgcgcacctctaagcggacttcaggaacagtgaccgtgaccgatcacttccgcgcctgggcgaaccggggcctgaacctcggcacaatagaccaaattacattgtgcgtggagggttaccaaagctctggatcagccaacatcacccagaacaccttctctcagggctcttcttccggcagttcgggtggctcatccggctccacaacgactactcgcatcgagtgtgagaacatgtccttgtccggaccctacgttagcaggatcaccaatccctttaatggtattgcgctgtacgccaacggagacacagcccgcgctaccgttaacttccccgcaagtcgcaactacaatttccgcctgcggggttgcggcaacaacaataatcttgcccgtgtggacctgaggatcgacggacggaccgtcgggaccttttattaccagggcacatacccctgggaggccccaattgacaatgtttatgtcagtgcggggagtcatacagtcgaaatcactgttactgcggataacggcacatgggacgtgtatgccgactacctggtgatacagtga

SEQ ID NO: 2934 - DNA, 2322 bp, Artificial Sequence
  Synthetic Construct, AT-91 intein modified protein encoding nucleic acids
atgcaaacaagcattactctgacatccaacgcatccggtacgtttgacggttactattacgaactctggaaggatactggcaatacaacaatgacggtctacactcaaggtcgcttttcctgccagtggtcgaacatcaataacgcgttgtttaggaccgggaagaaatacaaccagaattggcagtctcttggcacaatccggatcacgtactctgcgacttacaacccaaacgggaactcctacttgtgtatctatggctggtctaccaacccattggtcgagttctacatcgttgagtcctgggggaactggagaccgcctggtgcctgcctcgcgcctgggtcaaaggtcctcacggagcatggctactggctgaaggtggaggagctgccggagaagttcaagctgcagggcgttaaggtgtacaacctggacgagggccacaacgatacaagcaatgttgctttcgtggctgagagggaggtggagactggcgagatggccgtccgcgttaccacggagtccggcaggatcattgaggggagcgaggaccatccagtcctgacccctgagggctacgtttacctcgggaacctgaaggagggcaatctcgtgattgtctacccgttcgagggggttgagtacgaggagaggaagggcgtgatcctcgacgaggatgcgttcaaggacgaggatccccaggtgctctccttcctgagggagaagggcctcgtcccactgcgctgggacgatccccgcatcgggacaattgctcggatcctgggcttcgctttcggcgacgggtacctcggggagatgggcgggaggctcacactgactttctacggcaaggaggagacgctccgggagctgaagaaggacctggagcgcctgggcatttcggccaacctctacgtgcgcgagtctatcgagacaactagcggccactcggaggggaagtccctcagcatcgagctgcgcgtcacatcgaggtctttcgcgctcttcctggagaagctcggcatgccgagggggaagaagactgagaaggcgtacagggtgccaggctggatcctggaggctcctctgtgggtcaagaggaacttcctcgctgggctgttcgctgctgacggctcgattgtcgagttcaagggcaacaccccgctccccatcaatctgacgcagtcaaagtccgacgagctcgccgagaatctggtggagttcctcggggatgtcgccaagctcctggcggagttcggcatcgagaccacgctgtacgaggttaagtccaagaagggggtgacctaccgcctctctattgtcggcgaggactcaatcaggacgttcgttgagcggatcaattacgagtacgatcccgagaagaaggtgaagggcctgattgctgccgcgtacctcaagctgaaggagaggatcgtgaaggaggcgcatgaggctgtcaaggacgatttcccaaccttcgaggagttcgctaaggagaggggctacgagggcgggttcgtcgctgagaaggtggtcaaggtcgagagggttaagcctgagtacacgaagttctacgatattggggtttaccatgaggctcacaacttcattgctaatggcatcgtcgttcacaacacgtccctgggccaagtgacaatcgatggcgggacctacgacatctataggacgacacgcgtcaaccagccttccattgtggggacagccacgttcgatcagtactggagcgtgcgcacctctaagcggacttcaggaacagtgaccgtgaccgatcacttccgcgcctgggcgaaccggggcctgaacctcggcacaatagaccaaattacattgtgcgtggagggttaccaaagctctggatcagccaacatcacccagaacaccttctctcagggctcttcttccggcagttcgggtggctcatccggctccacaacgactactcgcatcgagtgtgagaacatgtccttgtccggaccctacgttagcaggatcaccaatccctttaatggtattgcgctgtacgccaacggagacacagcccgcgctaccgttaacttccccgcaagtcgcaactacaatttccgcctgcggggttgcggcaacaacaataatcttgcccgtgtggacctgaggatcgacggacggaccgtcgggaccttttattaccagggcacatacccctgggaggccccaattgacaatgtttatgtcagtgcggggagtcatacagtcgaaatcactgttactgcggataacggcacatgggacgtgtatgccgactacctggtgatacagtga

SEQ ID NO: 2935 - DNA, 2301 bp, Artificial Sequence
  Synthetic Construct, AT-92 intein modified protein encoding nucleic acids
atgcaaacaagcattactctgacatccaacgcatccggtacgtttgacggttactattacgaactctggaaggatactggcaatacaacaatgacggtctacactcaaggtcgcttttcctgccagtggtcgaacatcaataacgcgttgtttaggaccgggaagaaatacaaccagaattggcagtctcttggcacaatccggatcacgtactctgcgacttacaacccaaacgggaactcctacttgtgtatctatggctggtctaccaacccattggtcgagttctacatcgttgagtcctgggggaactggagaccgcctggtgcctgcgtggacggggacactctcgtgctgacaaaggagttcgggctcatcaagatcaaggacctctacaagattctggacggcaaggggaagaagacagtgaacggcaatgaggagtggacagagctggagaggccaatcactctgtacggctacaaggacgggaagatcgtcgagattaaggctacccacgtttacaagggcttctccgccgggatgatcgagattcggacccgcacgggccgcaagattaaggtcacgcccatccataagctcttcacaggcagggttactaagaatgggctggagatccgggaggtcatggccaaggacctcaagaagggcgatcggatcattgtggcgaagaagattgatggcggggagcgcgtgaagctgaacatccgcgtcgagcagaagaggggcaagaagatccggattccggacgtcctcgatgagaagctggccgagttcctcggctacctgatcgctgacgggaccctcaagccaaggacggtggccatctacaacaatgatgagtctctcctgcgcagggctaacgagctcgccaatgagctgttcaacattgagggcaagatcgtcaaggggcgcacagttaaggcgctcctgatccactcaaaggctctcgtggagttcttctccaagctgggcgtcccgcgcaacaagaaggccaggacttggaaggtcccgaaggagctcctgatctcagagcccgaggtggtcaaggcgttcattaaggcttacatcatgtgcgacggctactacgatgagaacaagggggagatcgagattgtgaccgctagcgaggaggctgcttacggcttctcgtacctcctggctaagctggggatctacgccatcattcgcgagaagatcattggcgacaaggtctactacagggttgtgatttccggcgagagcaacctggagaagctggggatcgagagggttggccgggggtacacgtcgtacgatatcgtcccagttgaggtggaggagctctacaacgctctgggcaggccttacgctgagctgaagagggcgggcatcgagattcataattacctctcgggggagaacatgtcttacgagatgttcaggaagttcgcgaagttcgtcggcatggaggagatcgctgagaaccacctcacccatgttctgttcgacgagatcgtggagattcggtacatctccgagggccaggaggtgtacgacgttactacggagactcataatttcattgggggcaacatgcctactctgctccacaacacgtccctgggccaagtgacaatcgatggcgggacctacgacatctataggacgacacgcgtcaaccagccttccattgtggggacagccacgttcgatcagtactggagcgtgcgcacctctaagcggacttcaggaacagtgaccgtgaccgatcacttccgcgcctgggcgaaccggggcctgaacctcggcacaatagaccaaattacattgtgcgtggagggttaccaaagctctggatcagccaacatcacccagaacaccttctctcagggctcttcttccggcagttcgggtggctcatccggctccacaacgactactcgcatcgagtgtgagaacatgtccttgtccggaccctacgttagcaggatcaccaatccctttaatggtattgcgctgtacgccaacggagacacagcccgcgctaccgttaacttccccgcaagtcgcaactacaatttccgcctgcggggttgcggcaacaacaataatcttgcccgtgtggacctgaggatcgacggacggaccgtcgggaccttttattaccagggcacatacccctgggaggccccaattgacaatgtttatgtcagtgcggggagtcatacagtcgaaatcactgttactgcggataacggcacatgggacgtgtatgccgactacctggtgatacagtga

SEQ ID NO: 2936 - DNA, 2961 bp, Artificial Sequence
  Synthetic Construct, AT-93 intein modified protein encoding nucleic acids
atgcaaacaagcattactctgacatccaacgcatccggtacgtttgacggttactattacgaactctggaaggatactggcaatacaacaatgacggtctacactcaaggtcgcttttcctgccagtggtcgaacatcaataacgcgttgtttaggaccgggaagaaatacaaccagaattggcagtctcttggcacaatccggatcacgtactctgcgacttacaacccaaacgggaactcctacttgtgtatctatggctggtctaccaacccattggtcgagttctacatcgttgagtcctgggggaactggagaccgcctggtgcctgcctctcgccagatactatggttcgcactactaacggggacaagccaatcagggacatcgcggtcggggatcagctcttcgatcacgaggacaggccagtgcagtgcctcgctgctgaggctatccagacctcccggatgatgaaggttacctacacgggctacaacagcgtgtcgaagtccagcttcacatgcactccagaccacatcatgaccctcgttgcgtacggggtgaagcctttccgccattctaactcaaatagggtgacctggtggacgaggtgcgacaggacggagctgggcgctgatgctgtcgagatcaagtgggatgctgccatgcacgacctctacacagagtaccgcgagcagctgggcaggaggccaactgacgctgaggtccggaagtacctcaaggctatcaccagcacgcgcgtggtcccagattcggaggacgatgactctcagagggtcgaggagacgtaccagtcgcccgttctcattaagctcctggcgaagctgaaggctatggatgtggacgtcgatggcgaggacgagtctgttgtgctcatgctcctgcagcagcacatggaggactacctggagcacatgatcccagagcctgaggatatttccgacgaggataacgatgacctcatcattgacctggatacaaataggaagcggaagatcggcacaatttctactctgtcgtctcgcatctcagacaagactttcaggcagtccccgagcattaagtcatcccccgtgaactctcagcagcagtcacagaatgaggcttcgcagtctaccgtcccgacgtacgcctcggttctcaccgaggatgaccaccgcgagatgttcgcgccagtgcggtcaaagctggctgtccgcgaccctaagtgcaagtgccagaacctctcctgcaagggcctgaggcgcgtcagcacagttttcgagacttcggagcaggctgacctggctctggagctcctgagcggggatcactaccgcgtcgttgacccatgcgccgtgcaggatatggaggtcttcacaatgactctggaggagtaccaggctacctgcacggctcctatgacgcagcataagtccaagctgcgcctctacaggagcccgctcaggttccagccataccagggctcagtgtccccagtcccaatcgacccgttctggttcgggttctggctgggcaacgggaccaagaacaattccgagattacaagcactgatcccgaggttgaggtgtacacgcaggcgctcgtggataggctgaatagggactcgatcccaccaggcaaggctccactgaaggtctctaagtacaagatcgacattggcaccaagcacgtgtacaagggggaggagatcaagaccacgaaggtcgcccatcgcctcagggtcatgagcaccgtttcgaacctggacaagacgcactggaatccagtgcatgatggcctgagggagctcggcctcctgggggacaagtccggcgggatccctgactgctacatgaacgcggatgagaatacaaggctggctgtgctcgccggcctgattgagtcagacggctggctctcccacgggctgaactgctacggcttcgggcagtacacctacgagctcaagaagctggtcgaggacgctcggaagctggctctctcctgcggcatccagtgcaaccccattttcgagaggaagaatggcaaggatcggccagagcctgggtggttcttctacatgggcaggggggtcgagaagttccagccacatctcctgctccctcggaagcgcatgaccatcccgttcacaactagcaagaacagggacgttcggccattcgacgtggaggatgctggcgacggggagttcaggctcattgaggtttcaggggagctcttccagctcgcggataggactgtggttcataatacgtccctgggccaagtgacaatcgatggcgggacctacgacatctataggacgacacgcgtcaaccagccttccattgtggggacagccacgttcgatcagtactggagcgtgcgcacctctaagcggacttcaggaacagtgaccgtgaccgatcacttccgcgcctgggcgaaccggggcctgaacctcggcacaatagaccaaattacattgtgcgtggagggttaccaaagctctggatcagccaacatcacccagaacaccttctctcagggctcttcttccggcagttcgggtggctcatccggctccacaacgactactcgcatcgagtgtgagaacatgtccttgtccggaccctacgttagcaggatcaccaatccctttaatggtattgcgctgtacgccaacggagacacagcccgcgctaccgttaacttccccgcaagtcgcaactacaatttccgcctgcggggttgcggcaacaacaataatcttgcccgtgtggacctgaggatcgacggacggaccgtcgggaccttttattaccagggcacatacccctgggaggccccaattgacaatgtttatgtcagtgcggggagtcatacagtcgaaatcactgttactgcggataacggcacatgggacgtgtatgccgactacctggtgatacagtga

SEQ ID NO: 2937 - DNA, 2733 bp, Artificial Sequence
  Synthetic Construct, AT-94 intein modified protein encoding nucleic acids
atgcaaacaagcattactctgacatccaacgcatccggtacgtttgacggttactattacgaactctggaaggatactggcaatacaacaatgacggtctacactcaaggtcgcttttcctgccagtggtcgaacatcaataacgcgttgtttaggaccgggaagaaatacaaccagaattggcagtctcttggcacaatccggatcacgtactctgcgacttacaacccaaacgggaactcctacttgtgtatctatggctggtctaccaacccattggtcgagttctacatcgttgagtcctgggggaactggagaccgcctggtgcctgcctcgctaaggggacactgctgctgcgctacgatgggacaaaggtggaggtggagaatgttcgggagggggatctgctgctgggcccagacggcgggcctaggagggcgttcaacattgtgggcgggagggaccggctctacaggatcaagatggagggcgggaaggaggatctggtggtcaccccaaatcacatcctggtcctccatcgcgagaagagggacggcgtcgataaggtttacgctaggccattcgctctcccactcctgcaggaggacgccaccgacgatggcgaggatctgtcggagatctctgcgattgagcacttcgacaccatggagatcacggctgctgacttcgcttccctcgatccgaacgagcgcaagctgtacaggctcttcacgagcccaggctacgagctgaatgggaggccagtgcccattgacccgtacttcctgggcctctggctgggggatcgctccaggaccaagtccagcatctacacgaaccacgaggaggagatccgggagttcattgcggaccatgctgccgagctcgatctgcagctcgtgtcatacgtctccaatcgcccatccctcgcggctatgaagaacggcaatcagctgcctctcaggcaccaggctaggcagacgatcaggaagcagcgcattgccgcgaagagcatcacacagccaggcggggctaggtcgtcttcataccctgccaccaacggcgggctgtccagcaatacagtgactagcctccactcgcgggagcgccatccactgtccgagtcgtctgctgccgcgacgatgaacctcctgccacgctccacaagcgtctcgacttctgttgctgcccagcctaagtcatccatgagcacattcatcactgacgctattctcccttcggagagctcgaacatctctgtcatttcagattccggcatcgagattagcaagtcttcaaagatgctgtcggaggaggaggccgacctggatctcttcgacattgattcggaggacgaggagatcgaggacctcgatgagaagaagaacgttagcaatgtggacgagttcccgaagcggcgcaggatccactacctgaggaccggctgccggacgtacggggagctctgcccaggcgaggaggaccagatcctggaggatattgttggcaggccagacgggaccacgtctgtggagtcactcctgctcgctctggaggctctggggctccatacctgcggcacgaacgacagcgggtcggataagaagcggatcccctcagtgtacatgaagaactcccgcgccgtgcgcctggctctgctcgctggcctcatcgactctggcgggtggtatgtggattcagagaacacattcggcttcagccagactgaggactctaattcaaccctgatctgggatgttgtgaccctggctaggagcctcggcttctccgtcagcacaaagcggcgcatgactcacaagccgaccaggacgcagcataaggcgcaggagttcgctcagatttcgggcaacgtcgcggagatcccatctctgctcgctagggagaggggcgttgagaggccaatctcccaggcgcacagcttcaagatcaaggacattcagctggagacagaggccactgagtgggcggggttcagggtggatcaggatcagctctacctcaggcatgacttcctcgttctgcataatacgtccctgggccaagtgacaatcgatggcgggacctacgacatctataggacgacacgcgtcaaccagccttccattgtggggacagccacgttcgatcagtactggagcgtgcgcacctctaagcggacttcaggaacagtgaccgtgaccgatcacttccgcgcctgggcgaaccggggcctgaacctcggcacaatagaccaaattacattgtgcgtggagggttaccaaagctctggatcagccaacatcacccagaacaccttctctcagggctcttcttccggcagttcgggtggctcatccggctccacaacgactactcgcatcgagtgtgagaacatgtccttgtccggaccctacgttagcaggatcaccaatccctttaatggtattgcgctgtacgccaacggagacacagcccgcgctaccgttaacttccccgcaagtcgcaactacaatttccgcctgcggggttgcggcaacaacaataatcttgcccgtgtggacctgaggatcgacggacggaccgtcgggaccttttattaccagggcacatacccctgggaggccccaattgacaatgtttatgtcagtgcggggagtcatacagtcgaaatcactgttactgcggataacggcacatgggacgtgtatgccgactacctggtgatacagtga

SEQ ID NO: 2938 - DNA, 1497 bp, Artificial Sequence
  Synthetic Construct, AT-95 intein modified protein encoding nucleic acids
atgcaaacaagcattactctgacatccaacgcatccggtacgtttgacggttactattacgaactctggaaggatactggcaatacaacaatgacggtctacactcaaggtcgcttttcctgccagtggtcgaacatcaataacgcgttgtttaggaccgggaagaaatacaaccagaattggcagtctcttggcacaatccggatcacgtactctgcgacttacaacccaaacgggaactcctacttgtgtatctatggctggtctaccaacccattggtcgagttctacatcgttgagtcctgggggaactggagaccgcctggtgcctgcctcgctaaggggacaaggctgctgcgctacgatgggacagagatcaacgtggaggacgtgcgggagggggatcagctgctcgggccagacggcgagccaaggagggcgttcaacatcgtttccggcattgaccggctctaccgcgtgaagatcggcggggagaaggaggatctcgtggtcaccccgaaccacattctggtgttctacagggagggcccatccgatgggcctgagaatgcggagcggcagacagtcgagatcactgccgcggagttcgctaccctcagcacggaggagcgctccctgtacagcgcgttcacctcgccagctgtcgagaagggcgctgaggggtcagctgctcagatgcattccttcaaggttgaggacatttcgctggagtctgagaagacggagtgggccggcttcagggtggataaggatcagctctacctcaggcatgattacctcgttctgcataacacgtccctgggccaagtgacaatcgatggcgggacctacgacatctataggacgacacgcgtcaaccagccttccattgtggggacagccacgttcgatcagtactggagcgtgcgcacctctaagcggacttcaggaacagtgaccgtgaccgatcacttccgcgcctgggcgaaccggggcctgaacctcggcacaatagaccaaattacattgtgcgtggagggttaccaaagctctggatcagccaacatcacccagaacaccttctctcagggctcttcttccggcagttcgggtggctcatccggctccacaacgactactcgcatcgagtgtgagaacatgtccttgtccggaccctacgttagcaggatcaccaatccctttaatggtattgcgctgtacgccaacggagacacagcccgcgctaccgttaacttccccgcaagtcgcaactacaatttccgcctgcggggttgcggcaacaacaataatcttgcccgtgtggacctgaggatcgacggacggaccgtcgggaccttttattaccagggcacatacccctgggaggccccaattgacaatgtttatgtcagtgcggggagtcatacagtcgaaatcactgttactgcggataacggcacatgggacgtgtatgccgactacctggtgatacagtga

SEQ ID NO: 2939 - DNA, 2115 bp, Artificial Sequence
  Synthetic Construct, AT-96 intein modified protein encoding nucleic acids
atgcaaacaagcattactctgacatccaacgcatccggtacgtttgacggttactattacgaactctggaaggatactggcaatacaacaatgacggtctacactcaaggtcgcttttcctgccagtggtcgaacatcaataacgcgttgtttaggaccgggaagaaatacaaccagaattggcagtctcttggcacaatccggatcacgtactctgcgacttacaacccaaacgggaactcctacttgtgtatctatggctggtctaccaacccattggtcgagttctacatcgttgagtcctgggggaactggagaccgcctggtgcctgcgtcgcgccagattcgctcgtggtcgtcaatgataaggttcaggagatcggcaagctgacagaggagtgggggcgggaggtcgggttcctggagtactccagcggcatcttctacgctccgtacctcggcagggggatttcactggacctcgttacagggaaggtgaagccgtctgtggtctcaaaagtgtggaagctgaagtcccccgaggagctcgtcaccatcaagaccattacgggcaaggagatcacagtgactccagagaccaagctcctgacgttcaacgggacactggagtggaaggaggcgggcaagatcaagcctggggattacgtgctgactgtcaagaagctccacatcaatggcaagcaggagaccctggacgagaagctcgcctacaagagggggctgagcctctcggatccactggagttcttctcctcctccgagaggactatctccgcgtacctgaagggcattttcgacaaggtcggcaggctcgttggggataccgccgttatcaaggtggacaaggatatggcgaagaggctgcagatcctcctgctcaggctcggcattgtctccagcgttgacgagacgggcaaggtcatcatcgggcgcgagtacatccagaagattctgggctacaacgtttccgttgtgacgcacgaggtcgagctcttcagggagttcatcgccgagatttccaagttctacggcacaagcgaggaggacgtctactcgtctctgcatgagaagggcgagctcgatatcgggactgtcccagttgagctgcctgagggcctccgggaggagatcaatcgcgagagggctacgtacagcgagctggtgaagatcgcccaggagattaaggacgagaagctgtacaacaagctcgcgtggatcctgtcggaggtcacggaggaggaggctaagattaaggagaaagtgaatacactcaaggtcatcctgtcatccgatctcattccggagcgcgtggagtcggtcaagatcattaagtctccgtacccctacgtgtacgatctcacagtggagggctctcattctttcattgctaatggcttcgtggttcataatacgtccctgggccaagtgacaatcgatggcgggacctacgacatctataggacgacacgcgtcaaccagccttccattgtggggacagccacgttcgatcagtactggagcgtgcgcacctctaagcggacttcaggaacagtgaccgtgaccgatcacttccgcgcctgggcgaaccggggcctgaacctcggcacaatagaccaaattacattgtgcgtggagggttaccaaagctctggatcagccaacatcacccagaacaccttctctcagggctcttcttccggcagttcgggtggctcatccggctccacaacgactactcgcatcgagtgtgagaacatgtccttgtccggaccctacgttagcaggatcaccaatccctttaatggtattgcgctgtacgccaacggagacacagcccgcgctaccgttaacttccccgcaagtcgcaactacaatttccgcctgcggggttgcggcaacaacaataatcttgcccgtgtggacctgaggatcgacggacggaccgtcgggaccttttattaccagggcacatacccctgggaggccccaattgacaatgtttatgtcagtgcggggagtcatacagtcgaaatcactgttactgcggataacggcacatgggacgtgtatgccgactacctggtgatacagtga

SEQ ID NO: 2940 - DNA, 2175 bp, Artificial Sequence
  Synthetic Construct, AT-97 intein modified protein encoding nucleic acids
atgcaaacaagcattactctgacatccaacgcatccggtacgtttgacggttactattacgaactctggaaggatactggcaatacaacaatgacggtctacactcaaggtcgcttttcctgccagtggtcgaacatcaataacgcgttgtttaggaccgggaagaaatacaaccagaattggcagtctcttggcacaatccggatcacgtactctgcgacttacaacccaaacgggaactcctacttgtgtatctatggctggtctaccaacccattggtcgagttctacatcgttgagtcctgggggaactggagaccgcctggtgcctgcctgctgccggaggagaaggtcgtgctgcctgagatcgggctggttacgctgcgggagctgttcgagctggctaatgaggtcgttgtcaaggacgaggagaaggaggttcggaagctgggcaagatgctcacaggggttgatgagcgcggcaacgtgaagctcctgaatgccctctacgtgtggagggtcgcgcacaagggcgagatgatccgggttaaggtgaacgggtggtactccgtcaccgttacgccggagcatcccttcctgacgaatagggggtgggtgaaggctggcgagctcaaggagggggactacatcgctattccgcgcagggtctacggcaacgaggatctgatgaagttctcgaagatcgccaaggagctcggcattaagggggacgagaaggagttctacctggccggcgcgtctctcgatatcccgattaaggtgctcttcctggctccctccaagctggtcagcgccttcctccgcggctacttcgacgcgaagggggtggtcagggagaactacatcgaggttccactgttcgaggatctccctctcctgctcctgaggttcggcatcgtctcgcggattgagaagtctaccctcaagatctcaggcaagcgcaacctggagctgttcaggaagcacgtggggttcacggactccgagaaggctaaggccctcgatgagctgatctccaaggccaaggagagcgagaggtacccaattctggaggagctgaggaggctcggcctcctgttcgggttcacacggaacgagctgcgcatcgaggagaatccaacttacgaggtgctgatggagatcctggagcgcattgagaggggctcacctaacctggcggagaagatcgctgtcctggagggccggattaaggaggagaactacctgcgcatcctggaggaggagggcctcattgagaatgggaagctgaccgagctcggcaaggagctcctggaggtctggaggaaccgggagttcgactcgaaggacgttgattacgtgaggaacatcgtggagaatctggtcttcctccccgtcgagaaggttgagcggatcgagtacgagggctacgtctacgacgttactacggagactcataatttcgttgctaatggcatcctcgttcataatacgtccctgggccaagtgacaatcgatggcgggacctacgacatctataggacgacacgcgtcaaccagccttccattgtggggacagccacgttcgatcagtactggagcgtgcgcacctctaagcggacttcaggaacagtgaccgtgaccgatcacttccgcgcctgggcgaaccggggcctgaacctcggcacaatagaccaaattacattgtgcgtggagggttaccaaagctctggatcagccaacatcacccagaacaccttctctcagggctcttcttccggcagttcgggtggctcatccggctccacaacgactactcgcatcgagtgtgagaacatgtccttgtccggaccctacgttagcaggatcaccaatccctttaatggtattgcgctgtacgccaacggagacacagcccgcgctaccgttaacttccccgcaagtcgcaactacaatttccgcctgcggggttgcggcaacaacaataatcttgcccgtgtggacctgaggatcgacggacggaccgtcgggaccttttattaccagggcacatacccctgggaggccccaattgacaatgtttatgtcagtgcggggagtcatacagtcgaaatcactgttactgcggataacggcacatgggacgtgtatgccgactacctggtgatacagtga

SEQ ID NO: 2941 - DNA, 2580 bp, Artificial Sequence
  Synthetic Construct, AT-98 intein modified protein encoding nucleic acids
atgcaaacaagcattactctgacatccaacgcatccggtacgtttgacggttactattacgaactctggaaggatactggcaatacaacaatgacggtctacactcaaggtcgcttttcctgccagtggtcgaacatcaataacgcgttgtttaggaccgggaagaaatacaaccagaattggcagtctcttggcacaatccggatcacgtactctgcgacttacaacccaaacgggaactcctacttgtgtatctatggctggtctaccaacccattggtcgagttctacatcgttgagtcctgggggaactggagaccgcctggtgccgctctctacgatttctcggttattcagctctctaatgggcggttcgttctcatcggggatctcgtggaggagctgttcaagaagtacgccgagaagatcaagacctacaaggacctggagtacattgagctgaacgaggaggataggttcgaggtggtctcagtctccccggacctcaaggcgaataagcacgttgtgtctcgggtgtggaggaggaaggtccgcgagggggagaagctgatccgcattaagaccaggacgggcaacgagatcattctcacacgcaatcatcccctgttcgccttcagcaacggggatgtcgttaggaaggaggctgagaagctcaaagtgggcgacagggttgccgtgatgatgcggccgccctcaccacctcagactaaggcggtggtcgacccagctatctacgttaagatttccgattactacctggtgccaaacggcaaggggatgatcaaggtccctaatgacggcattccgcccgagaaggcccagtacctcctgtctgtgaactcataccccgttaagctcgtgagggaggtcgatgagaagctcagctacctggctggggtcatcctgggcgacgggtacatttccagcaatggctactacatctcggcgaccttcgacgatgaggcgtacatggacgctttcgtctccgttgtgagcgatttcatcccaaactacgtgccttccattaggaagaatggggactacacaatcgtcactgttggctctaagattttcgccgagatgctctcacggatcttcggcattccgcgcgggaggaagtccatgtgggacatccccgatgtcgttctcagcaacgacgatctgatgcgctacttcatcgccggcctcttcgacgcggatggctacgtggacgagaatggcccgagcatcgtgctggtcaccaagtcggagacggtcgccaggaagatctggtatgtgctccagcggctgggcatcatttcgacggtttctcgggtgaagtcgcgcggcttcaaggagggggagctcttccgggttatcatttctggcgtggaggatctcgctaagttcgccaagttcatcccactgaggcactcccggaagcgcgctaagctcatggagatcctgcgcacaaagaagccttacaggggcaggcgcacttacagggtcccaatctcgtctgacatgattgctccactgaggcagatgctcgggctgaccgtggctgagctctcaaagctggcctcctactacgcgggcgagaaggtcagcgagtcgctcatccgccatattgagaaggggagggtgaaggagatcaggaggtcgacgctgaagggcatcgctctcgctctgcagcagattgctaaggatgtgggcaacgaggaggcttgggtcagggctaagaggctccagctgatcgctgagggcgacgtctactgggatgaggtggtcagcgtcgaggaggttgacccgaaggagctgggcatcgagtatgtgtacgatctcacagtggaggatgatcataactacgttgctaatggcattctcgtttctaatacgtccctgggccaagtgacaatcgatggcgggacctacgacatctataggacgacacgcgtcaaccagccttccattgtggggacagccacgttcgatcagtactggagcgtgcgcacctctaagcggacttcaggaacagtgaccgtgaccgatcacttccgcgcctgggcgaaccggggcctgaacctcggcacaatagaccaaattacattgtgcgtggagggttaccaaagctctggatcagccaacatcacccagaacaccttctctcagggctcttcttccggcagttcgggtggctcatccggctccacaacgactactcgcatcgagtgtgagaacatgtccttgtccggaccctacgttagcaggatcaccaatccctttaatggtattgcgctgtacgccaacggagacacagcccgcgctaccgttaacttccccgcaagtcgcaactacaatttccgcctgcggggttgcggcaacaacaataatcttgcccgtgtggacctgaggatcgacggacggaccgtcgggaccttttattaccagggcacatacccctgggaggccccaattgacaatgtttatgtcagtgcggggagtcatacagtcgaaatcactgttactgcggataacggcacatgggacgtgtatgccgactacctggtgatacagtga

SEQ ID NO: 2942 - DNA, 2217 bp, Artificial Sequence
  Synthetic Construct, AT-99 intein modified protein encoding nucleic acids
atgcaaacaagcattactctgacatccaacgcatccggtacgtttgacggttactattacgaactctggaaggatactggcaatacaacaatgacggtctacactcaaggtcgcttttcctgccagtggtcgaacatcaataacgcgttgtttaggaccgggaagaaatacaaccagaattggcagtctcttggcacaatccggatcacgtactctgcgacttacaacccaaacgggaactcctacttgtgtatctatggctggtctaccaacccattggtcgagttctacatcgttgagtcctgggggaactggagaccgcctggtgcctgcttctcgggggaggaggttattctcattgagaaggacggggagaagaaggttttcaagctgcgggagttcgtggacgggctgctgaaggaggcttctggcgaggggatggacggctcaatccgggtggtctacaaggatctccagggcgagaacatcaagattctcaccaaggatgggctggtgaagctcctctacgtgaaccgcagggaggggaagcagaagctcaggaagatcgttaatctggagaaggactactggctcgccctgaccccggagcacaaggtctacacgatcaagggcctgaaggaggcgggggagattaccaaggacgatgagatcattcgcgtcccgctcacgatcctggacggcttcgatgttgcggagaagtccattagggaggagctggagaggctgagcctcctgcccctcaactcagaggattccaggctggagaagatcgcgggcattatgggggctctcttcggctcgggcgggatcgacgagaacctcaatacactgtctttcgtgtccagcgagaagaagactatcgagcagttcgtcaaggctctcagcgagctgttcggcgagttcgactacaagatcgaggagaaggagaactccatcatcttccgcacctgcgataagcggatcgtgacattcttcgctactctgggcgccccagttggggacaagtcaaaggtgaagctcaagctgccatggtgggtcaagctcaagccttccctcttcctggccttcatggacggcctgtactcgtctaaccgcaatgataaggagatcctggagattacccagctgacggacaacgtggagacattcttcgaggagatcagctggtacctctcgttcttcggcattaaggccgaggcggaggaggacgaggagaaggataagtacagggctcggctcactctgtcatccagcatcgacaacatgctgaatttcattgagttcatcccgatttcgttctctcccgccaagagggagaagttcttcaaggagatcgagaagtacctggagtactccattcccgagaagacggaggacctgaagaagcgcgtcaagagggttaagaagggcgagcggcgcaacttcctggagtcctgggaggaggttgaggtgacctacaatgttactacggagacaggcaatctgctcgctaatgggctcttcgttaagaacacgtccctgggccaagtgacaatcgatggcgggacctacgacatctataggacgacacgcgtcaaccagccttccattgtggggacagccacgttcgatcagtactggagcgtgcgcacctctaagcggacttcaggaacagtgaccgtgaccgatcacttccgcgcctgggcgaaccggggcctgaacctcggcacaatagaccaaattacattgtgcgtggagggttaccaaagctctggatcagccaacatcacccagaacaccttctctcagggctcttcttccggcagttcgggtggctcatccggctccacaacgactactcgcatcgagtgtgagaacatgtccttgtccggaccctacgttagcaggatcaccaatccctttaatggtattgcgctgtacgccaacggagacacagcccgcgctaccgttaacttccccgcaagtcgcaactacaatttccgcctgcggggttgcggcaacaacaataatcttgcccgtgtggacctgaggatcgacggacggaccgtcgggaccttttattaccagggcacatacccctgggaggccccaattgacaatgtttatgtcagtgcggggagtcatacagtcgaaatcactgttactgcggataacggcacatgggacgtgtatgccgactacctggtgatacagtga

SEQ ID NO: 2943 - DNA, 2589 bp, Artificial Sequence
  Synthetic Construct, AT-100 intein modified protein encoding nucleic acids
atgcaaacaagcattactctgacatccaacgcatccggtacgtttgacggttactattacgaactctggaaggatactggcaatacaacaatgacggtctacactcaaggtcgcttttcctgccagtggtcgaacatcaataacgcgttgtttaggaccgggaagaaatacaaccagaattggcagtctcttggcacaatccggatcacgtactctgcgacttacaacccaaacgggaactcctacttgtgtatctatggctggtctaccaacccattggtcgagttctacatcgttgagtcctgggggaactggagaccgcctggtgcctgcctcacaggggacactaaggttatcgctaatgggcagctgttcgagctgggggagctggtggagaagctctcgggcgggcggttcggcccaacgccagtgaagggcctcaaggtcctggggatcgacgaggatggcaagctccgcgagttcgaggttcagtatgtgtacaaggaccgcaccgataggctgatcaagattaagacgcagctgggccgggagctcaaggtgacaccataccaccctctcctggtcaaccgcgagaatggcgagatcaagtggattaaggccgaggagctgaagccaggggacaagctcgcgatcccgtcgttcctccccctgattaccggcgagaaccctctggctgagtggctggggtacttcatgggctctgggtacgcttacccatcgaactctgtgatcaccttcacgaatgaggaccctctcatccgccagaggttcatggagctgaccgagaagctcttcccggacgcgaagatccgggagcgcattcatgctgatggcacgcccgaggtctacgtggtctccaggaaggcttggagcctcgttaactcaatctccctcaccctgattccacgggagggctggaaggggatccggtcgttcctgcgcgcctactctgactgcaatggccggatcgagtcagatgctattgtgctctccacggacaacaatgatatggcccagcagatcgcctacgcgctggcttcgttcgggatcattgcgaagatggacggcgaggatgtcatcattagcgggtcggacaacatcgagaggttcctcaatgagattggcttctctacacagtcaaagctgaaggaggcccagaagctcatcaggaagactaacgtgcggtctgacggcctgaagatcaattacgagctcatttcatacgttaaggacaggctccggctgaacgtgaatgataagcgcaacctgagctacaggaatgcgaaggagctgtcgtgggagctcatgaaggagatctactaccggctggaggagctggagcgcctcaagaaggtcctgtccgagccgatcctcattgactggaacgaggtcgccaagaagagcgatgaggttatcgagaaggccaagattcgcgcggagaagctcctggagtacatcaagggcgagaggaagccctccttcaaggagtacatcgagattgccaaggttctggggatcaacgtggagaggacaatcgaggctatgaagattttcgccaagaggtactccagctacgcggagatcggccggaagctggggacttggaacttcaatgtgaagacaatcctggagtccgacactgtcgataacgttgagatcctggagaagatccgcaagattgagctggagctgatcgaggagattctgagcgacgggaagctcaaggagggcatcgcgtacctgattttcctcttccagaacgagctctactgggatgagatcaccgaggtcaaggagctgaggggcgacttcatcatctacgatctgcacgttccaggctaccacaacttcattgcgggcaacatgccaacagtcgttcataacacgtccctgggccaagtgacaatcgatggcgggacctacgacatctataggacgacacgcgtcaaccagccttccattgtggggacagccacgttcgatcagtactggagcgtgcgcacctctaagcggacttcaggaacagtgaccgtgaccgatcacttccgcgcctgggcgaaccggggcctgaacctcggcacaatagaccaaattacattgtgcgtggagggttaccaaagctctggatcagccaacatcacccagaacaccttctctcagggctcttcttccggcagttcgggtggctcatccggctccacaacgactactcgcatcgagtgtgagaacatgtccttgtccggaccctacgttagcaggatcaccaatccctttaatggtattgcgctgtacgccaacggagacacagcccgcgctaccgttaacttccccgcaagtcgcaactacaatttccgcctgcggggttgcggcaacaacaataatcttgcccgtgtggacctgaggatcgacggacggaccgtcgggaccttttattaccagggcacatacccctgggaggccccaattgacaatgtttatgtcagtgcggggagtcatacagtcgaaatcactgttactgcggataacggcacatgggacgtgtatgccgactacctggtgatacagtga

SEQ ID NO: 2944 - DNA, 2133 bp, Artificial Sequence
  Synthetic Construct, AT-101 intein modified protein encoding nucleic acids
atgcaaacaagcattactctgacatccaacgcatccggtacgtttgacggttactattacgaactctggaaggatactggcaatacaacaatgacggtctacactcaaggtcgcttttcctgccagtggtcgaacatcaataacgcgttgtttaggaccgggaagaaatacaaccagaattggcagtctcttggcacaatccggatcacgtactctgcgacttacaacccaaacgggaactcctacttgtgtatctatggctggtctaccaacccattggtcgagttctacatcgttgagtcctgggggaactggagaccgcctggtgcctgcctgcatcctgacactctcattctcacatcacagggggttcgcaagatcaaggagctctcgcgggagggggaggttttcgctctcgacttcaacctgaagctctccaaggcgaagtacaggctcctggagcgggacgctgatgagcagatgtacaaggtgaccctcctggacggcacggagctgtacctcacagccgatcacccagtgctcgtctacagggagggcaatctggctttcgttcctgccgacaagctccgggagacggatcatgtggtcctggtgctcaacaagtctgctcgggacaattacggcttcctcgatctcctgctggagattactgactcacaggaggattacgccatcctggagaacggcgagaccctgtcgctccactctctgaagatgctcgtggagcgcggggagatcaaggacattgcggttgtgggcttctcgcataacaatttcgggaaggtcatgctcagggatgagctgtggtacctcatcggctacctggctgggaagggcggggagatcaagggcaacggggtcgttatttccagcaggacgaaggagatcgtcggcctgacaaagagcctcaacatcgacctgattgagaccgaggaggggatcgtgctctcaaataagtccttcgtccggctgctccacctgatccattacacgccgcgcgtccccgaggtttacggcatcattaacaatacagagtggctcaaggccttcctggcgggctactacgacgccactctgctggaggggctgaccctggaggctctctacaagatcaaggtctacctgcagctgctcggcatccgcgcgaagattgaggacaacaagctcaaggttcacctggaggatctccagcggttccgcgagctgctcggcaagttcagccgccgcaagctctacgtggagacttcgcaggttccggtgttcaccgacttcgatgagcgctcctacgacttcccaaggatcctgggcggggatatctacatcattggcatcaagagcattgagaagttccattacaaggggaaggtctacgatctcgtcgtggagaactaccacaacttcattgctaatggcattgctgtgcataatacgtccctgggccaagtgacaatcgatggcgggacctacgacatctataggacgacacgcgtcaaccagccttccattgtggggacagccacgttcgatcagtactggagcgtgcgcacctctaagcggacttcaggaacagtgaccgtgaccgatcacttccgcgcctgggcgaaccggggcctgaacctcggcacaatagaccaaattacattgtgcgtggagggttaccaaagctctggatcagccaacatcacccagaacaccttctctcagggctcttcttccggcagttcgggtggctcatccggctccacaacgactactcgcatcgagtgtgagaacatgtccttgtccggaccctacgttagcaggatcaccaatccctttaatggtattgcgctgtacgccaacggagacacagcccgcgctaccgttaacttccccgcaagtcgcaactacaatttccgcctgcggggttgcggcaacaacaataatcttgcccgtgtggacctgaggatcgacggacggaccgtcgggaccttttattaccagggcacatacccctgggaggccccaattgacaatgtttatgtcagtgcggggagtcatacagtcgaaatcactgttactgcggataacggcacatgggacgtgtatgccgactacctggtgatacagtga

SEQ ID NO: 2945 - DNA, 1794 bp, Artificial Sequence
  Synthetic Construct, AT-102 intein modified protein encoding nucleic acids
atgcaaacaagcattactctgacatccaacgcatccggtacgtttgacggttactattacgaactctggaaggatactggcaatacaacaatgacggtctacactcaaggtcgcttttcctgccagtggtcgaacatcaataacgcgttgtttaggaccgggaagaaatacaaccagaattggcagtctcttggcacaatccggatcacgtactctgcgacttacaacccaaacgggaactcctacttgtgtatctatggctggtctaccaacccattggtcgagttctacatcgttgagtcctgggggaactggagaccgcctggtgcctgcgtcgcgcctgatactctcattaacacagacaacgggcgggtggagatcggcaagttcgtggaggagtggatgaaggaggtcggggagatttcggaggagggcatctcttacgccccgtgcttccgcaaggtcgagaccttcaaggacgggaagattgttgagagcccaatccgcagggtgtggaagctccgggctcctaagaagctggtgcgcattaagacagagaacggccgcagcatcgccctcacaagggagactaagctcctgactatcaatgatggcgagctgtcgtgggtcgaggctggggaggtgaaggtcggcacctacgttgggacggtgaagtcagagaaggacgtgattccaggcgctgggaagaccatcagggatgtctccaagctctacaacatggagatggaggtcaaggactacctgacgagggaggaggttcggaaggcgattgagaagctggaggagatcatgaacccgatgaatatcaagattcccggcgtgcaggagtcctacgaggagctcctgcggaagctggagaccacgaacgatgagcgggttcgcaatgagacactcatcctcctgtccgacgtgagcgatgcccacgagctggcgaaggagaagatcgagaagattaaggagatcgtgaactccgaggtccattgggagaaggtcaccgaggttggcgaggtggacggggtcgagtatgtgtacgatctcacagtggagggctctcataatttcgttgctaatggcttcatcgttcataatacgtccctgggccaagtgacaatcgatggcgggacctacgacatctataggacgacacgcgtcaaccagccttccattgtggggacagccacgttcgatcagtactggagcgtgcgcacctctaagcggacttcaggaacagtgaccgtgaccgatcacttccgcgcctgggcgaaccggggcctgaacctcggcacaatagaccaaattacattgtgcgtggagggttaccaaagctctggatcagccaacatcacccagaacaccttctctcagggctcttcttccggcagttcgggtggctcatccggctccacaacgactactcgcatcgagtgtgagaacatgtccttgtccggaccctacgttagcaggatcaccaatccctttaatggtattgcgctgtacgccaacggagacacagcccgcgctaccgttaacttccccgcaagtcgcaactacaatttccgcctgcggggttgcggcaacaacaataatcttgcccgtgtggacctgaggatcgacggacggaccgtcgggaccttttattaccagggcacatacccctgggaggccccaattgacaatgtttatgtcagtgcggggagtcatacagtcgaaatcactgttactgcggataacggcacatgggacgtgtatgccgactacctggtgatacagtga

SEQ ID NO: 2946 - DNA, 2346 bp, Artificial Sequence
  Synthetic Construct, AT-103 intein modified protein encoding nucleic acids
atgcaaacaagcattactctgacatccaacgcatccggtacgtttgacggttactattacgaactctggaaggatactggcaatacaacaatgacggtctacactcaaggtcgcttttcctgccagtggtcgaacatcaataacgcgttgtttaggaccgggaagaaatacaaccagaattggcagtctcttggcacaatccggatcacgtactctgcgacttacaacccaaacgggaactcctacttgtgtatctatggctggtctaccaacccattggtcgagttctacatcgttgagtcctgggggaactggagaccgcctggtgcctgcctgctgccggaggagcgggttattctgcctgactacgggcctattactctggaggagctcttcaatatgacaaaggagacagtgttcaaggacgaggagaaggaggtccggaagctcggcatccgcatgccagtggctggcgtcgatgggcgggtgcgcctgctggagggcccctacgtttggaaggtgcgctacaaggggaagatgctcagggtcaagctgaaggactggcacagcgtggctgtcacaccagagcatcccttcctcaccacgcggggctgggtgcgcgctgaccagctgaagcccggggattacgttgccgtgccaaagatcctccctgggaaggacgataaggagaagttcctccagtatgtgcacgagaagctgaagggcaaggttcatattaagctgccgtccagcgacgaggagtgggagacattcttctacttcgccggcactatcttcgggcgcgagaactcggtgaatccagagggcctcacccacgaggtcaaggctctcctggagctcttcaaggttctgttcgagtacccgagggaggtcctccgggttctgttcatggccccggtgcgctacgtggcgaacttcctccgcggcttcttcgacattaacggctacgtcaatggggaggagctgagggtcgaggttaggggggctccacatgaggttctggaggagctctccctgatcctcctgaggctgggcatcgtgtccaagatctaccctacgagcctggctatttcgggcaggaggaacctggagctgttccggcgctacatcgggttctcggagaagcagaaggccaaggagctggagggcatcattaggcggtctgagaactcagagtcctacccaattttcgaggagctgcgcaggatcaggctcctgttcggcttcacccgggcggagctctcgtctacgatcccactgtactctaagtacgagtcaaaggaggctccttcatacgagatcctcatgaagattctgaatacaatcgagaaggggtctaaggacctcaacaagaagatcactattctggagggcagggtgcgggatcacgagtacattgaggagttcaagcgcgagggcctgatcaaggacgggaagctcaccgagctgggcaaggagctcctggaggtctggcgcaacagggagttcgactccagggatgtcaactacctccggaatatcattgagaacttcgttttcctgccggtggagaagatcgaggagttcgagtacgatggctacgtctacgacgttactacagagactcataatttcattgctaatggcatcctcgttcataatacgtccctgggccaagtgacaatcgatggcgggacctacgacatctataggacgacacgcgtcaaccagccttccattgtggggacagccacgttcgatcagtactggagcgtgcgcacctctaagcggacttcaggaacagtgaccgtgaccgatcacttccgcgcctgggcgaaccggggcctgaacctcggcacaatagaccaaattacattgtgcgtggagggttaccaaagctctggatcagccaacatcacccagaacaccttctctcagggctcttcttccggcagttcgggtggctcatccggctccacaacgactactcgcatcgagtgtgagaacatgtccttgtccggaccctacgttagcaggatcaccaatccctttaatggtattgcgctgtacgccaacggagacacagcccgcgctaccgttaacttccccgcaagtcgcaactacaatttccgcctgcggggttgcggcaacaacaataatcttgcccgtgtggacctgaggatcgacggacggaccgtcgggaccttttattaccagggcacatacccctgggaggccccaattgacaatgtttatgtcagtgcggggagtcatacagtcgaaatcactgttactgcggataacggcacatgggacgtgtatgccgactacctggtgatacagtga

SEQ ID NO: 2947 - DNA, 2439 bp, Artificial Sequence
  Synthetic Construct, AT-104 intein modified protein encoding nucleic acids
atgcaaacaagcattactctgacatccaacgcatccggtacgtttgacggttactattacgaactctggaaggatactggcaatacaacaatgacggtctacactcaaggtcgcttttcctgccagtggtcgaacatcaataacgcgttgtttaggaccgggaagaaatacaaccagaattggcagtctcttggcacaatccggatcacgtactctgcgacttacaacccaaacgggaactcctacttgtgtatctatggctggtctaccaacccattggtcgagttctacatcgttgagtcctgggggaactggagaccgcctggtgcctgcgtttcgggggactctaaggtcctgacggagaaggggccagtggagattcggcatctcaattcgggcatgatcgtgggcatcaatggcttcaagagcaggttcgtcaagttccaggagctgcaccaggtcaagtaccaggagtacggggttaagatccggacccagctcggcttcgaggtgaagtgcaccagggagcatcggttcctcacgattgacaagaacggcgagctgcgctgggttgaggcttggaggctcaaggagggcgattacgtggggatcattcgcaagctgccgtctcccaactcaaaggttctcatcctggacttcctcccggagtcgacgtacctctggctgaataaggagttcctcaagaagctgaaggtctctatcaaggagaagttcgggtcaattaagaactacgccaaggagcggggcttcaattccagctacctggtgaagcagctcaacgggctgtccccattccgctggggcaggctcagggttatcctgaatgatgtgtcgatcgagatttctcgggacgatatcgagcgcattacatcacgcaggggcaagtactccctcccaccagagctgactcctggcatcgctaggctcctggggttctggatggctagcggctcgctcaaccgcaataccctgatcttctactcgcaggacaagaagattctggagcgctacgaggatctgtgcaagcgcgagttcagggtcaaggggcggatcaaggcccaggacaagggcacgtacatcctggagattccctcgtctctcctgtctttcgtcttcaagaacctcgcgcgcccaaagctggaggttccaccgatcatctacatcctgcctgagaagcacaaggaggagttcctcgctggctacttcgacggcaacgggttcatcaagattgagaatgggaggatccattccctcggcttcttcgccttcaaccgcaagttcgcggaggggatcagggatattctcctgcagctcggcatcctgtcatccattaatgagcagacattcgaggtgagcatcattgagggcgagaagttcctgaagatcgtcaactcctggcgcagcaattactacaaggagtgggaggacgtgatcccgaacctggagaagaggctgaaggagattgaggagaagctcggctaccccgggacttacaatcggcgcgagatcaggcggtccgagctcaaggcgatcattaagctgtacgagaaggtggctcgggagaggggcctgaacgacgtcctcaaggagctgagctacctcaaggagctgtcggagggcgacatcttcttcgataggatcaccagcattgagccagtgtacctcgatgtcgcgtacggcatcatcaactcagagacaggcaactacgtggttaatggcttcgtttcaaagaacacgtccctgggccaagtgacaatcgatggcgggacctacgacatctataggacgacacgcgtcaaccagccttccattgtggggacagccacgttcgatcagtactggagcgtgcgcacctctaagcggacttcaggaacagtgaccgtgaccgatcacttccgcgcctgggcgaaccggggcctgaacctcggcacaatagaccaaattacattgtgcgtggagggttaccaaagctctggatcagccaacatcacccagaacaccttctctcagggctcttcttccggcagttcgggtggctcatccggctccacaacgactactcgcatcgagtgtgagaacatgtccttgtccggaccctacgttagcaggatcaccaatccctttaatggtattgcgctgtacgccaacggagacacagcccgcgctaccgttaacttccccgcaagtcgcaactacaatttccgcctgcggggttgcggcaacaacaataatcttgcccgtgtggacctgaggatcgacggacggaccgtcgggaccttttattaccagggcacatacccctgggaggccccaattgacaatgtttatgtcagtgcggggagtcatacagtcgaaatcactgttactgcggataacggcacatgggacgtgtatgccgactacctggtgatacagtga

SEQ ID NO: 2948 - DNA, 2436 bp, Artificial Sequence
  Synthetic Construct, AT-105 intein modified protein encoding nucleic acids
atgcaaacaagcattactctgacatccaacgcatccggtacgtttgacggttactattacgaactctggaaggatactggcaatacaacaatgacggtctacactcaaggtcgcttttcctgccagtggtcgaacatcaataacgcgttgtttaggaccgggaagaaatacaaccagaattggcagtctcttggcacaatccggatcacgtactctgcgacttacaacccaaacgggaactcctacttgtgtatctatggctggtctaccaacccattggtcgagttctacatcgttgagtcctgggggaactggagaccgcctggtgcctgcttctcaggggaggaggttattatcgtggagaagggcaaggaccgcaaggtcgttaagctgcgggagttcgtggaggacgctctcaaggagccatccggcgaggggatggacggcgatatcaaggtgacatacaaggacctgcgcggcgaggatgtcaggattctcactaaggacgggttcgtgaagctcctctacgtgaacaagcgcgagggcaagcagaagctcaggaagatcgtcaatctggacaaggattactggctcgccgttacacctgaccacaaggtgttcacttctgagggcctgaaggaggcgggggagatcacggagaaggacgagatcattagggtcccactcgttatcctggatggccctaagattgcctcaacatacggcgaggacgggaagttcgacgattacatccgctggaagaagtactacgagaagactggcaacgggtacaagcgcgccgcgaaggagctgaatatcaaggagagcaccctcaggtggtggacgcagggcgctaagccaaactcgctgaagatgatcgaggagctggagaagctgaatctcctgcctctgacctctgaggactcacggctggagaaggtcgccatcattctcggcgcgctgttctcagacgggaacatcgatcgcaacttcaataccctctccttcatctccagcgagcggaaggccattgagcgcttcgtggagacgctcaaggagctgttcggcgagttcaactacgagatcagggataatcatgagtccctcggcaagagcattctgttccggacctgggaccgcaggatcattcgcttcttcgtcgcgctgggcgctccggttgggaacaagacgaaggtgaagctggagctgccgtggtggatcaagctgaagccctcgctcttcctggccttcatggacggcctctactcgggcgatgggtctgtcccaaggttcgctcgctacgaggagggcatcaagttcaacgggaccttcgagattgctcagctgacggacgatgtggagaagaagctccccttcttcgaggagatcgcttggtacctctccttcttcggcattaaggccaaggttagggtggacaagacaggggataagtacaaggttcggctgatcttctcacagtccattgacaacgtgctcaatttcctggagttcatcccgattagcctctcgcccgctaagagggagaagttcctgcgggaggtcgagtcctacctcgctgctgttccagagtcgtctctggctggcaggatcgaggagctcagggagcacttcaaccggatcaagaagggcgagcggcgcagcttcattgagacctgggaggtggtcaatgtgacctacaatgttactacggagacaggcaatctgctcgctaatgggctcttcgttaagaatacgtccctgggccaagtgacaatcgatggcgggacctacgacatctataggacgacacgcgtcaaccagccttccattgtggggacagccacgttcgatcagtactggagcgtgcgcacctctaagcggacttcaggaacagtgaccgtgaccgatcacttccgcgcctgggcgaaccggggcctgaacctcggcacaatagaccaaattacattgtgcgtggagggttaccaaagctctggatcagccaacatcacccagaacaccttctctcagggctcttcttccggcagttcgggtggctcatccggctccacaacgactactcgcatcgagtgtgagaacatgtccttgtccggaccctacgttagcaggatcaccaatccctttaatggtattgcgctgtacgccaacggagacacagcccgcgctaccgttaacttccccgcaagtcgcaactacaatttccgcctgcggggttgcggcaacaacaataatcttgcccgtgtggacctgaggatcgacggacggaccgtcgggaccttttattaccagggcacatacccctgggaggccccaattgacaatgtttatgtcagtgcggggagtcatacagtcgaaatcactgttactgcggataacggcacatgggacgtgtatgccgactacctggtgatacagtga

SEQ ID NO: 2949 - DNA, 2394 bp, Artificial Sequence
  Synthetic Construct, AT-106 intein modified protein encoding nucleic acids
atgcaaacaagcattactctgacatccaacgcatccggtacgtttgacggttactattacgaactctggaaggatactggcaatacaacaatgacggtctacactcaaggtcgcttttcctgccagtggtcgaacatcaataacgcgttgtttaggaccgggaagaaatacaaccagaattggcagtctcttggcacaatccggatcacgtactctgcgacttacaacccaaacgggaactcctacttgtgtatctatggctggtctaccaacccattggtcgagttctacatcgttgagtcctgggggaactggagaccgcctggtgcctctatcctccctgatgagtggctgcctatcgtggagaatgagaaggttcggttcgttaagatcggggatttcattgatcgggagatcgaggagaacgccgagcgcgttaagagggacggcgagaccgagatcctggaggtgaaggatctcaaggccctgtccttcaatcgcgagacgaagaagagcgagctcaagaaggtcaaggcgctgatccgccacaggtactccggcaaggtgtacagcattaagctcaagtcggggcgcaggatcaagattacctcaggccattccctgttcagcgtcaagaacggcaagctcgttaaggtgcggggggacgagctcaagccaggcgatctggtggtcgttccaggccgcctcaagctgcctgagtcgaagcaggtgctcaacctggtcgagctcctgctcaagctgccagaggaggagacgtctaacatcgtcatgatgattcctgttaaggggcgcaagaatttcttcaagggcatgctcaagacactgtactggatcttcggcgagggggagaggccaaggactgctggcaggtacctcaagcacctggagaggctcggctacgtgaagctcaagaggaggggctgcgaggttctcgactgggagtccctgaagaggtaccggaagctgtacgagacactcatcaagaacctgaagtacaacggcaatagccgcgcttacatggtggagttcaattctctcagggacgtggtctcactgatgccgatcgaggagctcaaggagtggatcattggcgagccgagggggccaaagatcggcactttcattgatgtcgacgattcgttcgcgaagctgctcgggtactacatctccagcggcgacgtggagaaggatagggtcaagttccactccaaggaccagaacgtgctggaggatatcgccaagctcgcggagaagctgttcgggaaggtgaggaggggcagggggtacattgaggtcagcggcaagatctcgcatgctattttcagggtcctcgctgaggggaagcggatcccggagttcattttcaccagccccatggacatcaaggtggcgttcctgaagggcctcaacgggaatgctgaggagctgaccttctcgacgaagtctgagctgctcgtcaaccagctcatcctgctcctcaactccattggggtgtcagatatcaagattgagcatgagaagggcgtctacagggtttacatcaacaagaaggagtcgtctaatggcgacatcgttctggattcagtggagtccattgaggttgagaagtacgagggctacgtgtacgacctctctgtggaggataatgagaatttcctcgtgggcttcgggctgctctacgctcataatacgtccctgggccaagtgacaatcgatggcgggacctacgacatctataggacgacacgcgtcaaccagccttccattgtggggacagccacgttcgatcagtactggagcgtgcgcacctctaagcggacttcaggaacagtgaccgtgaccgatcacttccgcgcctgggcgaaccggggcctgaacctcggcacaatagaccaaattacattgtgcgtggagggttaccaaagctctggatcagccaacatcacccagaacaccttctctcagggctcttcttccggcagttcgggtggctcatccggctccacaacgactactcgcatcgagtgtgagaacatgtccttgtccggaccctacgttagcaggatcaccaatccctttaatggtattgcgctgtacgccaacggagacacagcccgcgctaccgttaacttccccgcaagtcgcaactacaatttccgcctgcggggttgcggcaacaacaataatcttgcccgtgtggacctgaggatcgacggacggaccgtcgggaccttttattaccagggcacatacccctgggaggccccaattgacaatgtttatgtcagtgcggggagtcatacagtcgaaatcactgttactgcggataacggcacatgggacgtgtatgccgactacctggtgatacagtga

SEQ ID NO: 2950 - DNA, 1530 bp, Artificial Sequence
  Synthetic Construct, AT-107 intein modified protein encoding nucleic acids
atgcaaacaagcattactctgacatccaacgcatccggtacgtttgacggttactattacgaactctggaaggatactggcaatacaacaatgacggtctacactcaaggtcgcttttcctgccagtggtcgaacatcaataacgcgttgtttaggaccgggaagaaatacaaccagaattggcagtctcttggcacaatccggatcacgtactctgcgacttacaacccaaacgggaactcctacttgtgtatctatggctggtctaccaacccattggtcgagttctacatcgttgagtcctgggggaactggagaccgcctggtgcctgcttcgctagggatacggaggtttactacgagaatgacacagttccgcacatggagtcaatcgaggagatgtactcaaagtacgcttccatgaacggcgagctcccgttcgacaatgggtacgcggtcccactcgataacgtgttcgtctacaccctggacatcgctagcggcgagattaagaagacgcgcgcctcgtacatctacagggagaaggtggagaagctcatcgagattaagctgtccagcggctactcactcaaggttacaccatcccacccagtgctcctgttccgggatgggctgcagtgggtgccagctgctgaggtcaagcctggcgacgtggtcgttggggtccgcgaggaggttctcaggaggcggatcatttccaagggcgagctggagttccatgaggtttcgtctgtgaggatcattgattacaacaattgggtctacgatctcgtcattccagagactcataacttcattgctccaaatgggctcgtgctccacaacacgtccctgggccaagtgacaatcgatggcgggacctacgacatctataggacgacacgcgtcaaccagccttccattgtggggacagccacgttcgatcagtactggagcgtgcgcacctctaagcggacttcaggaacagtgaccgtgaccgatcacttccgcgcctgggcgaaccggggcctgaacctcggcacaatagaccaaattacattgtgcgtggagggttaccaaagctctggatcagccaacatcacccagaacaccttctctcagggctcttcttccggcagttcgggtggctcatccggctccacaacgactactcgcatcgagtgtgagaacatgtccttgtccggaccctacgttagcaggatcaccaatccctttaatggtattgcgctgtacgccaacggagacacagcccgcgctaccgttaacttccccgcaagtcgcaactacaatttccgcctgcggggttgcggcaacaacaataatcttgcccgtgtggacctgaggatcgacggacggaccgtcgggaccttttattaccagggcacatacccctgggaggccccaattgacaatgtttatgtcagtgcggggagtcatacagtcgaaatcactgttactgcggataacggcacatgggacgtgtatgccgactacctggtgatacagtga

SEQ ID NO: 2951 - DNA, 2244 bp, Artificial Sequence
  Synthetic Construct, AT-108 intein modified protein encoding nucleic acids
atgcaaacaagcattactctgacatccaacgcatccggtacgtttgacggttactattacgaactctggaaggatactggcaatacaacaatgacggtctacactcaaggtcgcttttcctgccagtggtcgaacatcaataacgcgttgtttaggaccgggaagaaatacaaccagaattggcagtctcttggcacaatccggatcacgtactctgcgacttacaacccaaacgggaactcctacttgtgtatctatggctggtctaccaacccattggtcgagttctacatcgttgagtcctgggggaactggagaccgcctggtgcctgcgttaccccagacacgctggtttcgctctcggacgggcggattattgagatcagggaggcggtggagaactcggaggagtcgctgctcgggatcaacggcctgaagccgaaggaggccaaggcgctcaagttctgggagatcgactgggatgggccgatcaaggtcatcaagctgaagaatggccacgagatcaaggctaccccagaccatgggctcctggttatgagggatgggaagatcggctgggtgtcggctaagaacattcgggagggcgactacgtcgccttcatctacaatctcgggcaccgcggcgggaagaagtacacgctcccccagctcctgaaggagctgggcatctccgagtacgagaactccagctcgcaggagctcaacaatcgcgagcaggagatggactccaagcagatcagcattgagctggatgagaggttctggtacatcttcggcgtgattctcggcaaggggaccctgaagggggacaaggtggtcatcttccagaaggatgtcaagccggttattgaggaggcgctgcccttcgtccggatcttcgagtcggctgaccacatcggcttctctcatctcattctggctgaggtcttccgcaggctcggcgttggggagggcaagctccactccctggtgttcggcctgagggaggagtacatcaacgctatgattgccgggtacttcgacgctagcggcaccttcctcaggagggctgtcctgacgagcaagcgcggcgatatcctcaggatgctgtcggtgtacctctaccagatcggcattgtcaacaatctgaggagggacgagcatgctggcgtgtgggagctcatcatttctgatctggagaagttccgcgagaagatctacccttacctcaggattaagaagtcacagttcgacaaggtctactctatttcaaagaacgagggcgatttcctcccggttgcgtctatcttccggaagctgaagttccgcgacggcttcaagaatcggatcctcgacgaggagattccacgcgatgaggtggcgaaggtcctggagtacgctgaggactcacctgagaaggagttcctcaactccctggttgaggccagggtgacatgggttcgggtggagaagatcgaggagaggcattacactggcaagctctacgacttcacaactactacagagaacttcatttccaatggcatcgtctcacacaacacgtccctgggccaagtgacaatcgatggcgggacctacgacatctataggacgacacgcgtcaaccagccttccattgtggggacagccacgttcgatcagtactggagcgtgcgcacctctaagcggacttcaggaacagtgaccgtgaccgatcacttccgcgcctgggcgaaccggggcctgaacctcggcacaatagaccaaattacattgtgcgtggagggttaccaaagctctggatcagccaacatcacccagaacaccttctctcagggctcttcttccggcagttcgggtggctcatccggctccacaacgactactcgcatcgagtgtgagaacatgtccttgtccggaccctacgttagcaggatcaccaatccctttaatggtattgcgctgtacgccaacggagacacagcccgcgctaccgttaacttccccgcaagtcgcaactacaatttccgcctgcggggttgcggcaacaacaataatcttgcccgtgtggacctgaggatcgacggacggaccgtcgggaccttttattaccagggcacatacccctgggaggccccaattgacaatgtttatgtcagtgcggggagtcatacagtcgaaatcactgttactgcggataacggcacatgggacgtgtatgccgactacctggtgatacagtga

SEQ ID NO: 2952 - DNA, 2184 bp, Artificial Sequence
  Synthetic Construct, AT-109 intein modified protein encoding nucleic acids
atgcaaacaagcattactctgacatccaacgcatccggtacgtttgacggttactattacgaactctggaaggatactggcaatacaacaatgacggtctacactcaaggtcgcttttcctgccagtggtcgaacatcaataacgcgttgtttaggaccgggaagaaatacaaccagaattggcagtctcttggcacaatccggatcacgtactctgcgacttacaacccaaacgggaactcctacttgtgtatctatggctggtctaccaacccattggtcgagttctacatcgttgagtcctgggggaactggagaccgcctggtgcctgcctcgcgcctgggacaagggtcctgactgagcatggctactggctgaagattgaggagatgcctgagaagttcaagctgcagcggctccgcgtctacaacatcgaggagggccacaatgacttcagcaaggtggtcttcgtggctgagagggaggtcggctcggaggagaaggctatccgcattgtcacagagtccgggaaggttatcgagggcagcgaggaccatccagtgctcactcctgagggctacgtgtacctgaggaacgtgaaggagggcgattacatcctggtgtacccgttcgagggggtcccctacgaggagaagaagggcgtcattctcgacgagtccgctttcgagggcgaggatccgcaggttgtgaagttcctgcgcgagaggaacctcatcccactgcagtggaaggaccctaaagtgggcatcctcgctcggattctggggttcgctctcgcgaatggctacatcagcgagaacgataatctcaccttccacggcaaggaggaggtcctgagggaggttcggaaggacctggaggagctgggcatcgaggcgattgtcgctgaggaggataagctcaaggttacgtctagggagttcgctttcctcctggagaagctggggatggcccacgactcaatcccggagtggatcattgagggccccctctggattaagaggaacttcctcgctggcctgttcggggctaatggctcgatcgttgagttcaagggcgacgtgccgctgcccattaccctcacgcattcgcgggagctcctgaacgatgtctctcgcatcctggagggcttcaaggtgagggccaagattaagatggggaagaatggctcataccagctcgtcatcgaggacgaggattccattcgcaacttcctggggaggatcaattacgagtacgacccagagaagaaggccaggggcctcattgcttacgcctacctgaagttcaaggagctcatgaaggggaacctgatgaccttcgaggagttcgcccgggacaggggctacgagggcgggttcgtggcggagaaggtcatcgaggttaagagcgtgaagccggagtacgataagttctacgatattggggtctaccactcagctcataatttcattgctaatggcatcgtcgttcataacacgtccctgggccaagtgacaatcgatggcgggacctacgacatctataggacgacacgcgtcaaccagccttccattgtggggacagccacgttcgatcagtactggagcgtgcgcacctctaagcggacttcaggaacagtgaccgtgaccgatcacttccgcgcctgggcgaaccggggcctgaacctcggcacaatagaccaaattacattgtgcgtggagggttaccaaagctctggatcagccaacatcacccagaacaccttctctcagggctcttcttccggcagttcgggtggctcatccggctccacaacgactactcgcatcgagtgtgagaacatgtccttgtccggaccctacgttagcaggatcaccaatccctttaatggtattgcgctgtacgccaacggagacacagcccgcgctaccgttaacttccccgcaagtcgcaactacaatttccgcctgcggggttgcggcaacaacaataatcttgcccgtgtggacctgaggatcgacggacggaccgtcgggaccttttattaccagggcacatacccctgggaggccccaattgacaatgtttatgtcagtgcggggagtcatacagtcgaaatcactgttactgcggataacggcacatgggacgtgtatgccgactacctggtgatacagtga

SEQ ID NO: 2953 - DNA, 2142 bp, Artificial Sequence
  Synthetic Construct, AT-110 intein modified protein encoding nucleic acids
atgcaaacaagcattactctgacatccaacgcatccggtacgtttgacggttactattacgaactctggaaggatactggcaatacaacaatgacggtctacactcaaggtcgcttttcctgccagtggtcgaacatcaataacgcgttgtttaggaccgggaagaaatacaaccagaattggcagtctcttggcacaatccggatcacgtactctgcgacttacaacccaaacgggaactcctacttgtgtatctatggctggtctaccaacccattggtcgagttctacatcgttgagtcctgggggaactggagaccgcctggtgcctgcgtggacggggacacactggtgctgacaaaggagttcgggctcatcaagatcaaggagctctacgagaagctggacggcaaggggcgcaagattgtggagggcaacgaggagtggaccgagctggagaagccaatcacggtctacggctacaaggacgggaagatcgttgagattaaggccacccacgtttacaagggcgtgtccagcgggatggtcgagatcaggacccggacgggccggaagatcaaggtgacgccgattcaccgcctgttcacaggcagggtcactaaggacgggctgatcctcaaggaggtcatggctatgcatgttaagcccggcgataggatcgccgtggtcaagaagattgacggcggggagtacatcaagctcgattcgtctaacgtgggcgagatcaaggtcccggagattctcaatgaggagctggcggagttcctcggctacctgatggctaacggcacactgaagtcggggatcattgagatctactgcgacgatgagtctctcctggagagggtgaactccctgtccctcaagctgttcggcgtcggcgggcggattgtccagaaggttgacgggaaggcgctcgtgatccagagcaagccactggtcgacgttctcaggaggctgggcgtccctgaggataagaaggttgagaactggaaggtgccgcgggagctcctgctcagcccatcgaacgttgtgcgcgccttcgttaatgcgtacattaagggcaaggaggaggtcgagatcaccctcgcttccgaggagggggcttacgagctcagctacctgttcgctaagctgggcatctacgtgacaatttctaagtcaggggagtactacaaggtgcgcgtctcgcggaggggcaacctcgacactatcccagttgaagtgaatgggatgccaaaggtgctgccttacgaggatttcaggaagttcgccaagtccatcggcctggaggaggtcgcggagaatcacctgcagcatatcattttcgacgaggtcatcgatgtcaggtacattccggagccccaggaggtgtacgatgttactacagagactcataatttcgtggggggcaacatgccaactctgctccacaatacgtccctgggccaagtgacaatcgatggcgggacctacgacatctataggacgacacgcgtcaaccagccttccattgtggggacagccacgttcgatcagtactggagcgtgcgcacctctaagcggacttcaggaacagtgaccgtgaccgatcacttccgcgcctgggcgaaccggggcctgaacctcggcacaatagaccaaattacattgtgcgtggagggttaccaaagctctggatcagccaacatcacccagaacaccttctctcagggctcttcttccggcagttcgggtggctcatccggctccacaacgactactcgcatcgagtgtgagaacatgtccttgtccggaccctacgttagcaggatcaccaatccctttaatggtattgcgctgtacgccaacggagacacagcccgcgctaccgttaacttccccgcaagtcgcaactacaatttccgcctgcggggttgcggcaacaacaataatcttgcccgtgtggacctgaggatcgacggacggaccgtcgggaccttttattaccagggcacatacccctgggaggccccaattgacaatgtttatgtcagtgcggggagtcatacagtcgaaatcactgttactgcggataacggcacatgggacgtgtatgccgactacctggtgatacagtga

SEQ ID NO: 2954 - DNA, 2136 bp, Artificial Sequence
  Synthetic Construct, AT-111 intein modified protein encoding nucleic acids
atgcaaacaagcattactctgacatccaacgcatccggtacgtttgacggttactattacgaactctggaaggatactggcaatacaacaatgacggtctacactcaaggtcgcttttcctgccagtggtcgaacatcaataacgcgttgtttaggaccgggaagaaatacaaccagaattggcagtctcttggcacaatccggatcacgtactctgcgacttacaacccaaacgggaactcctacttgtgtatctatggctggtctaccaacccattggtcgagttctacatcgttgagtcctgggggaactggagaccgcctggtgcctgcgttaccgctgacacaaggctcgctacacagcatgggctggtccctatcgggtggctgcaggctaatgggggggctctggactgcacggtggacaggagggctctgggcgaggataggagggggacagttactcgcgccgctgtgccagcgttcctcagcgctggccaggctgaggtcttcaaggttaccacggccgagggctaccagatcaaggccacagcgtggcacgagttctacactgctaggggcaagctcaagctgtcggagctcaaggctggggacgagctgtgggtccagtccggcaaggggcagttcggcgctcagggcagcggggctctcggcctcctgatcgggctgattaccggcgacgggcatttcacgaaccgcggcaaggatgagcaggctgccgttatctccctgtggggcgaggagaggcagctcgctgacgatatcgccggctctgtcaatgccctcattgctgggacctcactggctccgcgcgactacctcgtgaagccagttgctgtggccgagcggaacatggtcttcattcgctcaaccatgctcgtcagggttctggatggctacgggttcaatggcgagacgaagctggaggtgccagaggtggtctggaggggctccgaggcttgcatgaggggctacctccaggggctgttccagacagacggcactgtgaacgtctccagcaattcccagagctgctcggtgcggctgtcgtcttcacaccgccctctcctgcaggatgttcaggtgctcctggcgaacttcggcgtcttctcgcgcatccatgagaggagggaggctggcccaaggtctctcccagacgggcagggcgggcagagggattacctgtgccagacacagcacgagctcatcgtggacggcgagtctcgcgaggcgttcatgagggagattgggttcctcctgcccgctaagcgggagaagtacgacgcttgggtcgccgataaggcgctcgttaagacccagaggttcgcggctaccatcacggcgattgagccagctggcgtggagcctgtctacgatactactcagccagacggcaacacagtcatcttcaatgggctcgttacggggcagacgtccctgggccaagtgacaatcgatggcgggacctacgacatctataggacgacacgcgtcaaccagccttccattgtggggacagccacgttcgatcagtactggagcgtgcgcacctctaagcggacttcaggaacagtgaccgtgaccgatcacttccgcgcctgggcgaaccggggcctgaacctcggcacaatagaccaaattacattgtgcgtggagggttaccaaagctctggatcagccaacatcacccagaacaccttctctcagggctcttcttccggcagttcgggtggctcatccggctccacaacgactactcgcatcgagtgtgagaacatgtccttgtccggaccctacgttagcaggatcaccaatccctttaatggtattgcgctgtacgccaacggagacacagcccgcgctaccgttaacttccccgcaagtcgcaactacaatttccgcctgcggggttgcggcaacaacaataatcttgcccgtgtggacctgaggatcgacggacggaccgtcgggaccttttattaccagggcacatacccctgggaggccccaattgacaatgtttatgtcagtgcggggagtcatacagtcgaaatcactgttactgcggataacggcacatgggacgtgtatgccgactacctggtgatacagtga

SEQ ID NO: 2955 - DNA, 2382 bp, Artificial Sequence
  Synthetic Construct, AT-112 intein modified protein encoding nucleic acids
atgcaaacaagcattactctgacatccaacgcatccggtacgtttgacggttactattacgaactctggaaggatactggcaatacaacaatgacggtctacactcaaggtcgcttttcctgccagtggtcgaacatcaataacgcgttgtttaggaccgggaagaaatacaaccagaattggcagtctcttggcacaatccggatcacgtactctgcgacttacaacccaaacgggaactcctacttgtgtatctatggctggtctaccaacccattggtcgagttctacatcgttgagtcctgggggaactggagaccgcctggtgcctgcctctctgcggatcatgaggttctcacatctacagggtggaaggctctccccgctattaaggatgcggatcaggttatgacgctggacctccagacgggcacacagcagtggaactcggtgcaggctaccacgaggttcgcgcgggagggctcactctacaggctgaagtccgacgatatggatgcggtctgcaacgagtctcaccgctggtacctcaatactaaggaccagccaacaacttacaccgctttcaccacgcagcagatgctggataaccagctcgtggctctgcgcaactcctccggcaaggctacggaccagtggaaccacgagtccgggacaactacccacacgaaccataatatccctacagtcggccataacgggaatgttatgttcagctggccagactgcccatggctcccacgcgagttcgtcgctgatgaggcgtgcaacctcgactggtgcaggttcatcggcctcgtgatgggcgacgggtcgattgatcatgtcacggacgctcagggccaggagcactacagcatccagattcatcagagggctgggaacccagcttcgaacgctaatacagaggatgtcctggagaggctggctgctaagctgccaaatttcgtggtccacccatcctgcgttagcggcgcggaggagaagcatacttggaccatcaaccaccgggacatgtaccatttcttcctccccatgatgcgcggcccacagtcctacgaccctctggataacgccatgtgcaggacctaccaggctccagattaccaggccctctcgcggtctgacaatgagcctatcattccagtgccagctgactggaagaccggcaactggtggcacctgcgcaggtggatcaattacccatggctcttctcgctggcccagtctcaggcgagggctatgattaagggcatggctgccgcgaacggggattggtcactctccctgaaggctaggctggacaccggcgattctggggttgtgagggttttcagcaattcgatccccctcatgcacgacatgtcagtgctgggcctcctggccgatactcgcgtgaacattggcgtcgaccataagaaggggcagatgcagctccaggtccctgttaccatgccggcgctcctggcttggtgcatctctttctcattcgcgaactccgacctggctgtggctgctccaaagcctgaggcgtacgataatccgaggcacgacggcttcgtttactgcctcacggtgcccaacgggaatttcctggcccggcgcacagtcgagtacagcgataatgataagattcaggaggtcattgatgctgctcagaagcctttcttcacaggcaacacgtccctgggccaagtgacaatcgatggcgggacctacgacatctataggacgacacgcgtcaaccagccttccattgtggggacagccacgttcgatcagtactggagcgtgcgcacctctaagcggacttcaggaacagtgaccgtgaccgatcacttccgcgcctgggcgaaccggggcctgaacctcggcacaatagaccaaattacattgtgcgtggagggttaccaaagctctggatcagccaacatcacccagaacaccttctctcagggctcttcttccggcagttcgggtggctcatccggctccacaacgactactcgcatcgagtgtgagaacatgtccttgtccggaccctacgttagcaggatcaccaatccctttaatggtattgcgctgtacgccaacggagacacagcccgcgctaccgttaacttccccgcaagtcgcaactacaatttccgcctgcggggttgcggcaacaacaataatcttgcccgtgtggacctgaggatcgacggacggaccgtcgggaccttttattaccagggcacatacccctgggaggccccaattgacaatgtttatgtcagtgcggggagtcatacagtcgaaatcactgttactgcggataacggcacatgggacgtgtatgccgactacctggtgatacagtga

SEQ ID NO: 2956 - DNA, 2154 bp, Artificial Sequence
  Synthetic Construct, AT-113 intein modified protein encoding nucleic acids
atgcaaacaagcattactctgacatccaacgcatccggtacgtttgacggttactattacgaactctggaaggatactggcaatacaacaatgacggtctacactcaaggtcgcttttcctgccagtggtcgaacatcaataacgcgttgtttaggaccgggaagaaatacaaccagaattggcagtctcttggcacaatccggatcacgtactctgcgacttacaacccaaacgggaactcctacttgtgtatctatggctggtctaccaacccattggtcgagttctacatcgttgagtcctgggggaactggagaccgcctggtgcctgcgttactgcggatacatgggttatgactacggcggggccggctcaggtttcggagctgacggggcggtctttctcggctgtcgttgacggcaaggcctacgcggtgacatccgatgggttcttcaggactggccacaagccagtcctcgctctgaggaccagggagggccctgctctccgcctgacggctgaccatagggttcgcagggtggctaggaggaccaggtacacgctggaggctgagtggaccgaggctgggcagctgcagccaggcgacgagatcctcctgcacgatcatagggctctcggcgggtgggagggggctggcacacacgctgaggggtacctcctgggcctcctgatcggggacggcactctcaagtccgataaggctgtcattagcgtttgggctccagagctgaaggtggctggcgggggcgctgtcgcctacgcgcagaccggcgccgggggcatcgttcaggccgcggaggctgctgctgctacgctctcccacagggtcgacttccggggcttccagaggtcgatttctgggaggggcgaggctaggatggcttctggcgccgtgcggcacctggctcatgagatggggatgaggccaggccataagacaatcaccacggccatggagaaggcgtccagcgtcttcactgaggggctcctgaggggcctcttcgacgctgatgggagcgttcagggctcgcaggagaagggcgtgagcctcaggctgtcacagtccgatctctcgctcctgcagaccgctcagaggatgctcctgaggctgggcatcgcctccacgatctacccgaacaggcggctcgctcaggctaggccactgccagacggcagggggggcctgcgcgtctacgagacagcgtcacagcacgagctcgttatctccgctgataatctgaggatctacgccgagcggattgggttcgccgacacggataaggctgacaggctcgatcaggctctgggctcttacaaccggtcactcaatcgggagcgcttcacagtgactgtcgagtcgctgaccgaggagggctctgaggacgtgttcgatgttactgtggcggatattcatgctttcgatgctaacgggctctacgttcataacacgtccctgggccaagtgacaatcgatggcgggacctacgacatctataggacgacacgcgtcaaccagccttccattgtggggacagccacgttcgatcagtactggagcgtgcgcacctctaagcggacttcaggaacagtgaccgtgaccgatcacttccgcgcctgggcgaaccggggcctgaacctcggcacaatagaccaaattacattgtgcgtggagggttaccaaagctctggatcagccaacatcacccagaacaccttctctcagggctcttcttccggcagttcgggtggctcatccggctccacaacgactactcgcatcgagtgtgagaacatgtccttgtccggaccctacgttagcaggatcaccaatccctttaatggtattgcgctgtacgccaacggagacacagcccgcgctaccgttaacttccccgcaagtcgcaactacaatttccgcctgcggggttgcggcaacaacaataatcttgcccgtgtggacctgaggatcgacggacggaccgtcgggaccttttattaccagggcacatacccctgggaggccccaattgacaatgtttatgtcagtgcggggagtcatacagtcgaaatcactgttactgcggataacggcacatgggacgtgtatgccgactacctggtgatacagtga

SEQ ID NO: 2957 - DNA, 2112 bp, Artificial Sequence
  Synthetic Construct, AT-114 intein modified protein encoding nucleic acids
atgcaaacaagcattactctgacatccaacgcatccggtacgtttgacggttactattacgaactctggaaggatactggcaatacaacaatgacggtctacactcaaggtcgcttttcctgccagtggtcgaacatcaataacgcgttgtttaggaccgggaagaaatacaaccagaattggcagtctcttggcacaatccggatcacgtactctgcgacttacaacccaaacgggaactcctacttgtgtatctatggctggtctaccaacccattggtcgagttctacatcgttgagtcctgggggaactggagaccgcctggtgccgcgggggttctctcgtcaaagattaagattcctgggggctggaagactatgggcaatattcgggtcggggatgaggtcgttacgccagacggcgggacagctaaggtcctcgctgttcacccacagggcgtgactaaggtggtcagggtccatttcaaggacggccggtacacagacgtctcgcccgatcacctctggaaggttcgcaggcaccattggtgcaacgataaggccatggcgaagctgactcgcgaggaggtggaggagagggtgtggagggtcatcaccacgaacgagctcaaggactacattggcctgagcacgaaggtttacgtgcagctcatcgagccggagaggaatgcggataagccattcaagattcacccttacgttctgggcgtgctcctgggcgacgggtgcatctcccagaaggctgtcgatattaccaagccataccagcagctcttcgacaaggtgcagagcctcctgcctgagcacctggagtgcgtctggaggccaaacaggaagggcgacggggagcccaagaccttcggcatccgcttcaaggatcggcgctccgagcagcacatcaattggcatattcgggacggcctgaaggagctcggcctgtacgggatgcgctcttggggcaaggtcatccccgaggagtacctccacgggtcagctaagcagaggctggagctcctgcagggcctcctggacaccgatgggacggttgataagcataagtcagtgtccttctccagctcgtctaagctcctgagcctcggcgtccagtacctcgttaggtcgctgggcgggatggctaggctgcaggagcgcacaccacactacactcataatggcgagaagagggaggggcggaccgactaccgggtctacatccgctacccgaggcccgaggagctcttcacgctggatcacaagagggagcgggcggtgtcccaccagcatacagagactctccgcctgcaggtcacccatatcgaggagaggcctgacgaggagacgcagtgcattactattgatcatccagatcatctctacattacggacgacttcatcgttactcacaacacgtccctgggccaagtgacaatcgatggcgggacctacgacatctataggacgacacgcgtcaaccagccttccattgtggggacagccacgttcgatcagtactggagcgtgcgcacctctaagcggacttcaggaacagtgaccgtgaccgatcacttccgcgcctgggcgaaccggggcctgaacctcggcacaatagaccaaattacattgtgcgtggagggttaccaaagctctggatcagccaacatcacccagaacaccttctctcagggctcttcttccggcagttcgggtggctcatccggctccacaacgactactcgcatcgagtgtgagaacatgtccttgtccggaccctacgttagcaggatcaccaatccctttaatggtattgcgctgtacgccaacggagacacagcccgcgctaccgttaacttccccgcaagtcgcaactacaatttccgcctgcggggttgcggcaacaacaataatcttgcccgtgtggacctgaggatcgacggacggaccgtcgggaccttttattaccagggcacatacccctgggaggccccaattgacaatgtttatgtcagtgcggggagtcatacagtcgaaatcactgttactgcggataacggcacatgggacgtgtatgccgactacctggtgatacagtga

SEQ ID NO: 2958 - DNA, 2361 bp, Artificial Sequence
  Synthetic Construct, AT-115 intein modified protein encoding nucleic acids
atgcaaacaagcattactctgacatccaacgcatccggtacgtttgacggttactattacgaactctggaaggatactggcaatacaacaatgacggtctacactcaaggtcgcttttcctgccagtggtcgaacatcaataacgcgttgtttaggaccgggaagaaatacaaccagaattggcagtctcttggcacaatccggatcacgtactctgcgacttacaacccaaacgggaactcctacttgtgtatctatggctggtctaccaacccattggtcgagttctacatcgttgagtcctgggggaactggagaccgcctggtgcctgcttcgctaaggggacaaaggttctcatggctaacggggatgacaagaatattgaggacatcgcggtcggggaggaggttctcgggaaggacggcctcccacgcgaggtggtcgctctgcctcgggggagggagacaatgtacgaggtcagcgagaagactcagcacagggcggagaccgttttcggcacggcctcgtacacatgcaacgcgactcacaagctcgtgctgcagaccaatcagagggttaacatcacgaatcatgtgctccggggcgagtctcagacctcagttacgtacttccagatgaagaccgctgtggctgacgggagggagattgagctcccaaagctgtgcacgaagtccttccagcactccagccatggccgggagaacgcttggaagaaggccgaggtcttcgcgtccacaatcagccgcgaccccattgattggactgcggaggctcgcgacatctctaggctcggctaccacgtgcgcagggctaccaggcagctctggagcccagttctggtggagaaggaggtcctggctcctatgatcgccaagcggggcttcgatgagtccattgcgccgtacatggcttacctcgtggggctgtgggtcggcgacgggtactccgatagggccacattcagcatcgacattcaggatgtggagatccacgagaggattaaggacttcgcctcacatgctggcctgactccaaggatcgcttgctacaagaagtccagggatgctaccatttcactccacaactccgagacgcggggcaagaatgtccgccagaacctgaatacggggaacctcctgtggtcgctcctggctgagatctgcggcaagaaggagaatgagatgctcttcaagctggtgccaagcttcctccgctcagagtccatcgcggtccgggagtacttcatttctggcctggtcgactcagatgggcacgttaagcgcgacgaggctgataagtgctacagcgccacagtgaagactatctaccctgccgtccgggacggcctcgtcagcgttgcgcgctcgctggggattcagacaagcgtgtcggtcgaggaggccaaggaggtcaactcggttaagcatcaggagtcttacgccatctacatggccaactcctccgctctcgactcggtgctgtctaagtgcgctgctccaaggaagcgggctgaggagcccgtttgcgtgaacagggagccgcacccctacacgttccacatggtcgagaaggaggaggacgatttctacggcatcactctctcagaggactcggatcatcagttcctgctctctaatctcgctctcgttcataatacgtccctgggccaagtgacaatcgatggcgggacctacgacatctataggacgacacgcgtcaaccagccttccattgtggggacagccacgttcgatcagtactggagcgtgcgcacctctaagcggacttcaggaacagtgaccgtgaccgatcacttccgcgcctgggcgaaccggggcctgaacctcggcacaatagaccaaattacattgtgcgtggagggttaccaaagctctggatcagccaacatcacccagaacaccttctctcagggctcttcttccggcagttcgggtggctcatccggctccacaacgactactcgcatcgagtgtgagaacatgtccttgtccggaccctacgttagcaggatcaccaatccctttaatggtattgcgctgtacgccaacggagacacagcccgcgctaccgttaacttccccgcaagtcgcaactacaatttccgcctgcggggttgcggcaacaacaataatcttgcccgtgtggacctgaggatcgacggacggaccgtcgggaccttttattaccagggcacatacccctgggaggccccaattgacaatgtttatgtcagtgcggggagtcatacagtcgaaatcactgttactgcggataacggcacatgggacgtgtatgccgactacctggtgatacagtga

SEQ ID NO: 2959 - DNA, 2298 bp, Artificial Sequence
  Synthetic Construct, AT-116 intein modified protein encoding nucleic acids
atgcaaacaagcattactctgacatccaacgcatccggtacgtttgacggttactattacgaactctggaaggatactggcaatacaacaatgacggtctacactcaaggtcgcttttcctgccagtggtcgaacatcaataacgcgttgtttaggaccgggaagaaatacaaccagaattggcagtctcttggcacaatccggatcacgtactctgcgacttacaacccaaacgggaactcctacttgtgtatctatggctggtctaccaacccattggtcgagttctacatcgttgagtcctgggggaactggagaccgcctggtgcctgcctcgcgggggacactctcattacactggctgacgggcggcgggttcctattcgggagctggtctcgcagcagaatttctcggtctgggcgctgaacccgcagacgtacaggctggagagggctcgggtctcccgggccttctgcacaggcatcaagcccgtttacaggctgaccacgaggctcgggaggagcattagggctactgctaatcaccgcttcctgaccccacagggctggaagagggtggacgagctccagcctggggattacctggctctcccaaggaggatccccacggccagcacaccaactctgaccgaggctgagctcgctctcctgggccacctgatcggcgacgggtgcactctccctcaccatgtgattcagtacacctctagggacgctgatctggctacgctcgtcgctcatctggccacaaaggtcttcggctcaaaggttaccccgcagatccgcaaggagctcaggtggtaccaggtgtacctgagggctgctaggccactcgctcctggcaagcgcaacccgatcagcgactggctgagggatctcggcattttcgggctgcggtcgtacgagaagaaggtccccgcgctcctgttctgccagacgtccgaggccatcgcgacattcctgaggcacctctgggctactgacggctgcattcagatgaggagggggaagaagccatacccagctgtgtactacgcgacctccagctaccagctcgcgagggatgtccagtcgctcctgctccgcctgggcatcaacgccaggctcaagaccgttgctcagggcgagaaggggagggtgcagtaccatgtgaaggtctccggcagggaggacctgctcaggttcgtggagaagattggcgctgtcggggctaggcagagggctgctctggcctcggtttacgactacctctctgtgcggacgggcaacccaaatcgcgatatcattcctgtggctctgtggtacgagctcgtccgcgaggccatgtaccagaggggcatctcgcaccggcagctgcatgcgaacctcgggatggcttacggcgggatgacactgttccggcagaatctctctcgggctcgcgccctgaggctcgctgaggctgctgcctgcccagagctgaggcagctcgctcagtcagacgtctactgggatccgatcgtttccattgagcccgacggcgttgaggaggtgttcgatctcactgttccagggccacataacttcgttgctaatgacatcattgctcataatacgtccctgggccaagtgacaatcgatggcgggacctacgacatctataggacgacacgcgtcaaccagccttccattgtggggacagccacgttcgatcagtactggagcgtgcgcacctctaagcggacttcaggaacagtgaccgtgaccgatcacttccgcgcctgggcgaaccggggcctgaacctcggcacaatagaccaaattacattgtgcgtggagggttaccaaagctctggatcagccaacatcacccagaacaccttctctcagggctcttcttccggcagttcgggtggctcatccggctccacaacgactactcgcatcgagtgtgagaacatgtccttgtccggaccctacgttagcaggatcaccaatccctttaatggtattgcgctgtacgccaacggagacacagcccgcgctaccgttaacttccccgcaagtcgcaactacaatttccgcctgcggggttgcggcaacaacaataatcttgcccgtgtggacctgaggatcgacggacggaccgtcgggaccttttattaccagggcacatacccctgggaggccccaattgacaatgtttatgtcagtgcggggagtcatacagtcgaaatcactgttactgcggataacggcacatgggacgtgtatgccgactacctggtgatacagtga

SEQ ID NO: 2960 - DNA, 2130 bp, Artificial Sequence
  Synthetic Construct, AT-117 intein modified protein encoding nucleic acids
atgcaaacaagcattactctgacatccaacgcatccggtacgtttgacggttactattacgaactctggaaggatactggcaatacaacaatgacggtctacactcaaggtcgcttttcctgccagtggtcgaacatcaataacgcgttgtttaggaccgggaagaaatacaaccagaattggcagtctcttggcacaatccggatcacgtactctgcgacttacaacccaaacgggaactcctacttgtgtatctatggctggtctaccaacccattggtcgagttctacatcgttgagtcctgggggaactggagaccgcctggtgcctgcgttacggcggagacatgggttatgacggatgagggggctaggcaggtctcggctctgctggatcggcctttcagggcggtcgtgaacggcatcgcctacgattcaggcgagcacgggttcttctgcaccggcctcaagccagtgaagaggctgtccaccgcttgcgggaggcacctcaggctgacggctgaccatctggtccggaaggtggtcggcaagacgaggtggaggcaggaggttgagtgggtgccagctggcgacctcaggcctggggatgaggtgaagctgcacgaccatcgcaccgcgatgattcagacgaggcctgaggatgagaggggctacctcctggggctcctgatcggcgacggggttattcgcgacgataagacactcatctccgtgtggccacaggaggagtgcattggcgctcagccactggggcaccccgtcatgcataaggttgaggctctcctgagggacctcccacacagggctgatttcgctggctggcagaaggtcgagggcaggggggagtacaggatcggcacagctgctctcactgctctggctgctgagtacggcctcacacgcgggaggaagaccatcacgccggagattgagggcgctgagactgctggcttcggggctgctgtcctcaggggcctgttcgacgctgatggcagcgttcagggggctcaggagaagggcgtgtccgtcaggctcgctcagagcgacctggctctcctgcaggctgctcagaggatgctcgctaggctgggcatgaacgctgtgatctacgagaatcgcagggaggcgggcagggctttcctgccagacgggaagggcgggcaggctcacttcgagaccaaggcgcagcatgagctcgtcatctcgggcgagaacctggcgacataccaggagcggattgggttcactgatgtggctaaggctaggaggctcgctgtcgctctgtcgggctacaagagggccctcaatcgggagcgcttctctgccgttgtggcggacgtcgttgacgatggcatggcggaggtgttcgatgttcaggttccaggggttaatgctttcgatgctaatggcttctacgttcacaacacgtccctgggccaagtgacaatcgatggcgggacctacgacatctataggacgacacgcgtcaaccagccttccattgtggggacagccacgttcgatcagtactggagcgtgcgcacctctaagcggacttcaggaacagtgaccgtgaccgatcacttccgcgcctgggcgaaccggggcctgaacctcggcacaatagaccaaattacattgtgcgtggagggttaccaaagctctggatcagccaacatcacccagaacaccttctctcagggctcttcttccggcagttcgggtggctcatccggctccacaacgactactcgcatcgagtgtgagaacatgtccttgtccggaccctacgttagcaggatcaccaatccctttaatggtattgcgctgtacgccaacggagacacagcccgcgctaccgttaacttccccgcaagtcgcaactacaatttccgcctgcggggttgcggcaacaacaataatcttgcccgtgtggacctgaggatcgacggacggaccgtcgggaccttttattaccagggcacatacccctgggaggccccaattgacaatgtttatgtcagtgcggggagtcatacagtcgaaatcactgttactgcggataacggcacatgggacgtgtatgccgactacctggtgatacagtga

SEQ ID NO: 2961 - DNA, 2058 bp, Artificial Sequence
  Synthetic Construct, AT-118 intein modified protein encoding nucleic acids
atgcaaacaagcattactctgacatccaacgcatccggtacgtttgacggttactattacgaactctggaaggatactggcaatacaacaatgacggtctacactcaaggtcgcttttcctgccagtggtcgaacatcaataacgcgttgtttaggaccgggaagaaatacaaccagaattggcagtctcttggcacaatccggatcacgtactctgcgacttacaacccaaacgggaactcctacttgtgtatctatggctggtctaccaacccattggtcgagttctacatcgttgagtcctgggggaactggagaccgcctggtgcctgcctcaagcgggggacagaggtcattatgttcgatgggacaactaagaaggtggaggacgttatcgtgggggacgttctcatggggccagacagcacccctaggaacgtgctctcgctgggcagggggagggagatgatgtacgaggtgaagccacggaagggcgagtcctacacggtcaatgagtcacacatcctctccctgcgcaccacgacaggcattgcgaaggggtcctggcctgacaacacagtcttcgatatcagcgttcgggactggctcaagctgccaaagtatgtgactggccctaatgggtacctcaagggctggagggtgccagtcgatttcccaaggaaggagcaggacgaggctctcctgccaccatacctgatgggcctctggctgggcgacgggacttccagctcgggcgctatcacctcgggggagaatgagaaggagattagggcttacctggagtcttacgctgctaggaacggcatgcagatcaggaaggaggggctgacttggtctatttcacacggcaacaccgggcacaagaagcatggcttcacgcatgcgctcaagagcgctggggtgctgaacaataagcacatcccgcataactacaagtgcggcgataggaggcagaggctggagctcctggctggcctcctggactctgatgggtactgcgatctctcaaaggctggcttcgactggatttccgttagcgagaggctggccgacgatttctgctacctctgccggtcgctgggcttcgctgcctacaagaagaagacctgcaagcgctgcgcgaacacagacgtctggggcgattacttcagggtttcggtgtctggggacttctccgaggtgccattcgtcaggggcaggcatcagaatctccccaagcgcaacatcaataagaacgttctgaacgtgggcatcgagtccattacccccgtcggcgttgacgattacttcgggttcacaattgatggggattcaaggttcctcctcggggatttcacagttactcataataccacgtccctgggccaagtgacaatcgatggcgggacctacgacatctataggacgacacgcgtcaaccagccttccattgtggggacagccacgttcgatcagtactggagcgtgcgcacctctaagcggacttcaggaacagtgaccgtgaccgatcacttccgcgcctgggcgaaccggggcctgaacctcggcacaatagaccaaattacattgtgcgtggagggttaccaaagctctggatcagccaacatcacccagaacaccttctctcagggctcttcttccggcagttcgggtggctcatccggctccacaacgactactcgcatcgagtgtgagaacatgtccttgtccggaccctacgttagcaggatcaccaatccctttaatggtattgcgctgtacgccaacggagacacagcccgcgctaccgttaacttccccgcaagtcgcaactacaatttccgcctgcggggttgcggcaacaacaataatcttgcccgtgtggacctgaggatcgacggacggaccgtcgggaccttttattaccagggcacatacccctgggaggccccaattgacaatgtttatgtcagtgcggggagtcatacagtcgaaatcactgttactgcggataacggcacatgggacgtgtatgccgactacctggtgatacagtga

SEQ ID NO: 2962 - DNA, 2028 bp, Artificial Sequence
  Synthetic Construct, AT-119 intein modified protein encoding nucleic acids
atgcaaacaagcattactctgacatccaacgcatccggtacgtttgacggttactattacgaactctggaaggatactggcaatacaacaatgacggtctacactcaaggtcgcttttcctgccagtggtcgaacatcaataacgcgttgtttaggaccgggaagaaatacaaccagaattggcagtctcttggcacaatccggatcacgtactctgcgacttacaacccaaacgggaactcctacttgtgtatctatggctggtctaccaacccattggtcgagttctacatcgttgagtcctgggggaactggagaccgcctggtgccgctcagccgctggattcgctcgttctcgcgcctacggggttccgccgcatgggggatctcagggagggggatgaggtcgtggtccctaacggcgagatcgcgctgattgacggggtcttcccacagggcgtcagggacgtttggcggatcgtgctgagcgatggctccagcgtcgagtgcgacgatgagcacctctggattgtcggcacatcgtgcgggtggcataggggccagactccgaaggtcatgaccacgcgcgagatcaggctcgacacattcaaggccaacggctcctccaagtggtatgtgccagctgctaccccagtcgacctggggccagatgttggcctgccactcgacccttacctcttcggcctcctgctcggcgatgggtccttccgccacaatctgaggctcagcaccgtcgacgatgagatcagggacgctgctgctgatgctgtggctccggactgccggctggtgcccgtcaccggctcgcgctgcgattacacgatccagctcaagcagcggtctggcggggttcgcaacccagtgattcaggctctgaggaggctggacctctgggggaagacctcccacggcaagttcatccctgaggatttcaagaacacgtctattaagaataggctgtcactgctccaggggctgctcgacacagatggcactgttcatgccgacgggatgtcagtgtccctcaggagcgcttcgctgaggctcgctgaggacgtcgcttggctggttcgctctctcggcgggagggctcgggtcctcccagagaaggctgccttccatgtttcagtggctctgccagacgagtacgctcctttccggctctcccgcaaggctgatcgcgtgaggccaaggcccaagtacaatacgttccggaggggcatccgcgctgtggagtatgtgggcaggaagccggctcagtgcatttctgttgggcatccttcacatgcttacgttacggataatttcactgttactcataatacgtccctgggccaagtgacaatcgatggcgggacctacgacatctataggacgacacgcgtcaaccagccttccattgtggggacagccacgttcgatcagtactggagcgtgcgcacctctaagcggacttcaggaacagtgaccgtgaccgatcacttccgcgcctgggcgaaccggggcctgaacctcggcacaatagaccaaattacattgtgcgtggagggttaccaaagctctggatcagccaacatcacccagaacaccttctctcagggctcttcttccggcagttcgggtggctcatccggctccacaacgactactcgcatcgagtgtgagaacatgtccttgtccggaccctacgttagcaggatcaccaatccctttaatggtattgcgctgtacgccaacggagacacagcccgcgctaccgttaacttccccgcaagtcgcaactacaatttccgcctgcggggttgcggcaacaacaataatcttgcccgtgtggacctgaggatcgacggacggaccgtcgggaccttttattaccagggcacatacccctgggaggccccaattgacaatgtttatgtcagtgcggggagtcatacagtcgaaatcactgttactgcggataacggcacatgggacgtgtatgccgactacctggtgatacagtga

SEQ ID NO: 2963 - DNA, 2511 bp, Artificial Sequence
  Synthetic Construct, AT-120 intein modified protein encoding nucleic acids
atgcaaacaagcattactctgacatccaacgcatccggtacgtttgacggttactattacgaactctggaaggatactggcaatacaacaatgacggtctacactcaaggtcgcttttcctgccagtggtcgaacatcaataacgcgttgtttaggaccgggaagaaatacaaccagaattggcagtctcttggcacaatccggatcacgtactctgcgacttacaacccaaacgggaactcctacttgtgtatctatggctggtctaccaacccattggtcgagttctacatcgttgagtcctgggggaactggagaccgcctggtgcctgcttcgctaaggggacacaggttatgatggcggacgggtcggacaagtcgattgaggatattcagctcggggagaatgttatgggcaaggacggcacaccaaggactgtgatctccctcccccgcgggaaggagacaatgtacgaggtctgccactccagcaccaagggcaccacgaaggacacgctgatgaactacgtgtgcagcgggaatcataagatcgtcatgcagacaccacagcagatcggcattactgagcacggcattgacgggaagacctacacgagcgtctcgtacttcgctctcagggattcgcagcacggctaccctatcgttaagaagctgacgaagtctttcgagcatcagcagcacggcgggaaggagcagaccctcatcacggttaacaatttcgtgtcgtctctgaagtcggagccgattaactgggacgtggaggccaagcattacgagtccctcggccactacgtcaagaagtgcagctaccagctgatcaacccggttttccatcagagcggcaagctcgcccaggagattgcgtcgctgaattactctaaggacaaggctcccctcctggcctggctcatcggcttctgggtgggcaacggggctatgcgccactctcagttcgtggtcgagtcacaggacattgagctcgtcaacaggatccaggatattgcgggcctcctgaatctgtccgcgacaactgcttgctactactctggctcaaaggacgatgaggccaagctcgcgaagctgaactcatccagcgctgagggcttcgaggacgacctggaggggaatccaagcgtgaaggagctcgcggacatggataggctgtccgagagcaagacagcgactctgcctaccgctttcggcgtcgagaacatcgacgagctcatcatttcactgggcgaggggaggggcaacgggaatgtcttcgcccaggttatcggctctttcgggattgacctcgctgacaaggatacactggttactaagatcgcccatgagctcgctggcgacgccttcgaggtgagggagcagttcgtggctggcctggtcgatgctgctggctacgtgcgcaaggacgtgtacgatcacgcgtcagaggctaccatctccacggagtcgaagtctaccgtcctcggcctggttaagattgccaggtccctggggatcaagattaccgtgacgtcagacgattccgacgatagcgacgagcacgatcatgcgcactgcggccatgaccacgggtcgtcttcatcctacacagccgtcatgactggggatgcgctcacgaacagcatgcggttctgcgcgatcggccgcaatagggttgctgccaaggagttcatgcgccaggctgtgcccttctacttcagcctggagaagaagtcggaggacgattactacggcatcacagttccagataatacggataagcagtacctgctctcttctatggctctcgttcataatacgtccctgggccaagtgacaatcgatggcgggacctacgacatctataggacgacacgcgtcaaccagccttccattgtggggacagccacgttcgatcagtactggagcgtgcgcacctctaagcggacttcaggaacagtgaccgtgaccgatcacttccgcgcctgggcgaaccggggcctgaacctcggcacaatagaccaaattacattgtgcgtggagggttaccaaagctctggatcagccaacatcacccagaacaccttctctcagggctcttcttccggcagttcgggtggctcatccggctccacaacgactactcgcatcgagtgtgagaacatgtccttgtccggaccctacgttagcaggatcaccaatccctttaatggtattgcgctgtacgccaacggagacacagcccgcgctaccgttaacttccccgcaagtcgcaactacaatttccgcctgcggggttgcggcaacaacaataatcttgcccgtgtggacctgaggatcgacggacggaccgtcgggaccttttattaccagggcacatacccctgggaggccccaattgacaatgtttatgtcagtgcggggagtcatacagtcgaaatcactgttactgcggataacggcacatgggacgtgtatgccgactacctggtgatacagtga

SEQ ID NO: 2964 - DNA, 2454 bp, Artificial Sequence
  Synthetic Construct, AT-121 intein modified protein encoding nucleic acids
atgcaaacaagcattactctgacatccaacgcatccggtacgtttgacggttactattacgaactctggaaggatactggcaatacaacaatgacggtctacactcaaggtcgcttttcctgccagtggtcgaacatcaataacgcgttgtttaggaccgggaagaaatacaaccagaattggcagtctcttggcacaatccggatcacgtactctgcgacttacaacccaaacgggaactcctacttgtgtatctatggctggtctaccaacccattggtcgagttctacatcgttgagtcctgggggaactggagaccgcctggtgcctcagtctcttacgatacgccagtcctcatcagggaccctattaacaagatccatctcgtgaagatcggggagttcattgataagttctacgaggagggcgaggagaggacggctaagcacgtgaatgggtactacgtcctctcccatgacggcttccaggtggtctggaagccgatcaagtatgtgctgcggcaccgcacaaacgagatctacgagatcatctacgagggcgggggcaagctggaggctaccggctcgcattctgttttcgtgctcgacccggatacgctggatatcgtcgagaagcccgttatgctcctgaataagggggagtacctggtttctttcaacggcgtgaaggagaataaggaccaccagacaatcgacctcattgatctggtttcggactacaacgatgtctacgttgataatatcccatctgagctcaagaagcatactgggggcaggaacccaatccctctcaagcagtacatgatcctgaggaagcgggtcattacaaagaagaacaatagcctcatcaagctgcgcaggtcgaagtacactctcccgattcggctcgtgctggacgagaagctcgccttcctgttcggggcctacatcgctaacggctgcgtcaaggagaggagggacaagctgatctgcttcaccttcggcaagtccgccaagaacatcgcggataaggtcatgaatattatgtacgagaagttcaacatcaagccattcattgacgatagggggacatacatcatctacgagtaccctcacactctcctggcgatcattttcgagaagctcctgggccgcaagctggaggagaagaagatgccagagatcctgtggtccagccctaagagcgtgattcgcgcgttcttcgagggcctcagggcttactcccagcgcaccctgaggaggaggtacacgagctacaccacggctaacaagaatctcgcctaccagctcctgtggctggctaggttcgctggcttctactcggtcctcaaggaggagaaggaggccgggaagaacaatggcaagacgtactaccatgtgatcgtctacctggaccagtcttacaggaagccgaacgcgtcagagcgggttccggtgaagcccatcctcaagctgattaagtacacaaagccaaggactatgccaccagagctcgcttacatcaagaggcgggagttcatttcaaggaagaccgcgctcaaggctctggagtggatccgcagggacggctcattcacggatttctcccgcgagtacctcaggaagatcgagtccctgattaacggggacatcattgtcctgaagatcaaggatgttcgcaagaagcagtacaagggctacgtgtacgacatttcagttccaattacggaggctttcttcgggggcaacattccaatcctgctccacaacacgtccctgggccaagtgacaatcgatggcgggacctacgacatctataggacgacacgcgtcaaccagccttccattgtggggacagccacgttcgatcagtactggagcgtgcgcacctctaagcggacttcaggaacagtgaccgtgaccgatcacttccgcgcctgggcgaaccggggcctgaacctcggcacaatagaccaaattacattgtgcgtggagggttaccaaagctctggatcagccaacatcacccagaacaccttctctcagggctcttcttccggcagttcgggtggctcatccggctccacaacgactactcgcatcgagtgtgagaacatgtccttgtccggaccctacgttagcaggatcaccaatccctttaatggtattgcgctgtacgccaacggagacacagcccgcgctaccgttaacttccccgcaagtcgcaactacaatttccgcctgcggggttgcggcaacaacaataatcttgcccgtgtggacctgaggatcgacggacggaccgtcgggaccttttattaccagggcacatacccctgggaggccccaattgacaatgtttatgtcagtgcggggagtcatacagtcgaaatcactgttactgcggataacggcacatgggacgtgtatgccgactacctggtgatacagtga

SEQ ID NO: 2965 - DNA, 2064 bp, Artificial Sequence
  Synthetic Construct, AT-122 intein modified protein encoding nucleic acids
atgcaaacaagcattactctgacatccaacgcatccggtacgtttgacggttactattacgaactctggaaggatactggcaatacaacaatgacggtctacactcaaggtcgcttttcctgccagtggtcgaacatcaataacgcgttgtttaggaccgggaagaaatacaaccagaattggcagtctcttggcacaatccggatcacgtactctgcgacttacaacccaaacgggaactcctacttgtgtatctatggctggtctaccaacccattggtcgagttctacatcgttgagtcctgggggaactggagaccgcctggtgcctcataccataaggatttcaagattatgctcgctgacgggcgcaaggttcgcatcggggatctcgtggatgagctgatcggcaagaatagggagaaggttatcaagggcaaggacacagagattctgttcgtggacgatctcttcctcctgtcgtacaatatgcggtctggggagcaggttctggtgaaggctgatcgggtgagccgccacaaggctccagaccagttcatcaagctgcgcttctcgaacggcgctgagatcattgtcaccccggagcatcccgttctcatcattaacaatggcaagatcaagaccgttagggcggatacggtgcggaaggggaccctgacgatcggcgtgctcgggcacaagatcattaaggaggtcaacgaggacgatatcattaacaatatccgcaggaagattgtgctggacaaggagctcccgtacatccacgctaagaatatttcagaggccgtcgagatgcgggaccagctgatgtccatcgatattcccaccttcatcgttaagcataagaacgagattcgcctgtacccatccggcccttgcagcctcaggaggctcctgctcatgcacggggtcgaggaggtggtcttctcggacgagctgctctacgagatcatgaattgccatctctacccggccacctggtacgagctgctctactccatgggcctgacgaagatcgccaaggagctcaacgtgtacgacttcgagattctggcgggcatcattaagaaggtggagaaggaggtcatcatgctctctcaggtcctggggctccgcaacgagacacagactgagctgctccatctgaagtcaaggcgggagctgctcatcaggctcaaggacaagctggatatgctccgcaagaggctgaaggacctggaggaggccctcggcaaggatgccgtgatcaggatgattacagacgtcgaggttatcaagaacactgactccgattgggtctacgacattactattgagccttaccacctcttcgtttcggatgggctcattctgcataacacgtccctgggccaagtgacaatcgatggcgggacctacgacatctataggacgacacgcgtcaaccagccttccattgtggggacagccacgttcgatcagtactggagcgtgcgcacctctaagcggacttcaggaacagtgaccgtgaccgatcacttccgcgcctgggcgaaccggggcctgaacctcggcacaatagaccaaattacattgtgcgtggagggttaccaaagctctggatcagccaacatcacccagaacaccttctctcagggctcttcttccggcagttcgggtggctcatccggctccacaacgactactcgcatcgagtgtgagaacatgtccttgtccggaccctacgttagcaggatcaccaatccctttaatggtattgcgctgtacgccaacggagacacagcccgcgctaccgttaacttccccgcaagtcgcaactacaatttccgcctgcggggttgcggcaacaacaataatcttgcccgtgtggacctgaggatcgacggacggaccgtcgggaccttttattaccagggcacatacccctgggaggccccaattgacaatgtttatgtcagtgcggggagtcatacagtcgaaatcactgttactgcggataacggcacatgggacgtgtatgccgactacctggtgatacagtga

SEQ ID NO: 2966 - DNA, 2046 bp, Artificial Sequence
  Synthetic Construct, AT-123 intein modified protein encoding nucleic acids
atgcaaacaagcattactctgacatccaacgcatccggtacgtttgacggttactattacgaactctggaaggatactggcaatacaacaatgacggtctacactcaaggtcgcttttcctgccagtggtcgaacatcaataacgcgttgtttaggaccgggaagaaatacaaccagaattggcagtctcttggcacaatccggatcacgtactctgcgacttacaacccaaacgggaactcctacttgtgtatctatggctggtctaccaacccattggtcgagttctacatcgttgagtcctgggggaactggagaccgcctggtgcctgcctcgggaaggggacaccggttatgatgtacgatgggcggacaaagccagtggagaaggtggaggtcggggacaggctcatgggggacgatggcagcccaaggacggtgcagtcgctggccagggggagggagcagatgtactgggtccgccagaagaggggcatggactacagggttaacgagagccacatcctctcgctgaagaagtctaggagggagggcgcccgcgacagggggtcaatcgcggatatttccgtccgcgactacctggatcagtctgacaagtggaaggacgataacaagggcttcaaggtggctgctgagttcccagaccagccagtccccctcgatccttacttcctcggcctgtggctcggcgatgggaagtccgacaatgctaggatctacaccacggacgaggaggtcatcacgggcctgcaggagattgccgagaagcggggggacacaatttcagtgtccgatgagcatcggcgctgcccagcctacctcgtcaagtctggcgacaggggcggggctatggctaccagggagtcagttcagggcgctctgagggctctcggcgtgctgggggacaagcacatccctcatctgtacctcggcaactccagggggaagcggctcaggctcctggctggcctgattgacagcgatggccacctcaatgacgggcatggcgggacgtacgagatcacacagtccagcgagcagctggcgagggacattaagttcctctgcgatactctgggctaccggacatcgctcactcagaagaccgctcgcatctcgtctaccggctacgagtccgaggttcacagggtgcggttcaacgggaatgttgacgagattccggtgcgggtcgagcgcaagaaggcttccccatggactgatgtcagggactggcggatgaccggcatcgatgtcgagcccgacggcgttggggattacttcggcttcactctggatggcaatgggcgcttcctcctcggggatggcactgttactcataatacgtccctgggccaagtgacaatcgatggcgggacctacgacatctataggacgacacgcgtcaaccagccttccattgtggggacagccacgttcgatcagtactggagcgtgcgcacctctaagcggacttcaggaacagtgaccgtgaccgatcacttccgcgcctgggcgaaccggggcctgaacctcggcacaatagaccaaattacattgtgcgtggagggttaccaaagctctggatcagccaacatcacccagaacaccttctctcagggctcttcttccggcagttcgggtggctcatccggctccacaacgactactcgcatcgagtgtgagaacatgtccttgtccggaccctacgttagcaggatcaccaatccctttaatggtattgcgctgtacgccaacggagacacagcccgcgctaccgttaacttccccgcaagtcgcaactacaatttccgcctgcggggttgcggcaacaacaataatcttgcccgtgtggacctgaggatcgacggacggaccgtcgggaccttttattaccagggcacatacccctgggaggccccaattgacaatgtttatgtcagtgcggggagtcatacagtcgaaatcactgttactgcggataacggcacatgggacgtgtatgccgactacctggtgatacagtga

SEQ ID NO: 2967 - DNA, 2088 bp, Artificial Sequence
  Synthetic Construct, AT-124 intein modified protein encoding nucleic acids
atgcaaacaagcattactctgacatccaacgcatccggtacgtttgacggttactattacgaactctggaaggatactggcaatacaacaatgacggtctacactcaaggtcgcttttcctgccagtggtcgaacatcaataacgcgttgtttaggaccgggaagaaatacaaccagaattggcagtctcttggcacaatccggatcacgtactctgcgacttacaacccaaacgggaactcctacttgtgtatctatggctggtctaccaacccattggtcgagttctacatcgttgagtcctgggggaactggagaccgcctggtgcctgcttcgatcctgagacagaggtcgtgacagtggacggcattaggcatgtggaggagattgaggtcggggatagggtttactcgctgaacccagacacgggcgctgtcgagatcaagcccgttaccgcgacgcagagccagcattacgctggcccgatggtggagattaagaaccagcataccgacttcctggtcacgcccaatcaccgcttcctcacacagaggttcacttcgggcgagtacacagatctggagtgggagactgctggcgacatgctcggggatcgcatccgcaggaggctcccatcactgaggtccctccctgctacacaggagaggccaggccctatctcactgtccgctgtgtgcgacaggctcgctatcgagcacaagactggcccacgcgggattaaggagctgaggaggcaggctaggtggcagcctgaggagtacgagctcacagattggctgaggatcctcggctggttcgccacagaggggactctgtacaagtctaaggcgaggcagtacgagaacggcaatgtgcggggggtctcataccagaccacgctctgccagaagaacgacatcggccgctccgagattgcgacgctcctgaacaggaccgggatcacgtactccagcgaccagaatgatcatagcttctgctcgaaggttctgtacgagattctggaggctgagtgcggcagcgactcgttctctaagcacctgccaccatggatcttccagctggggccaaaggacctcaagattgtcttcgataccctcatgcagggcgactccgctgctaacggggatcggttcacaacttcgtctaatcagctggccgaggacttcatcaggctcgctatgcacattggcaggagggctttccacatgccgaacgatgggtctcacaggatccaggttaataccgtgaggggccagcggccgacgattaagcccaagcatcggcagcaggtcgactacgatggcatgatccactgcctgaccgtggcggataatcatactgtgctcgctggcaggaataggaagttcaattggactgggcagacgtccctgggccaagtgacaatcgatggcgggacctacgacatctataggacgacacgcgtcaaccagccttccattgtggggacagccacgttcgatcagtactggagcgtgcgcacctctaagcggacttcaggaacagtgaccgtgaccgatcacttccgcgcctgggcgaaccggggcctgaacctcggcacaatagaccaaattacattgtgcgtggagggttaccaaagctctggatcagccaacatcacccagaacaccttctctcagggctcttcttccggcagttcgggtggctcatccggctccacaacgactactcgcatcgagtgtgagaacatgtccttgtccggaccctacgttagcaggatcaccaatccctttaatggtattgcgctgtacgccaacggagacacagcccgcgctaccgttaacttccccgcaagtcgcaactacaatttccgcctgcggggttgcggcaacaacaataatcttgcccgtgtggacctgaggatcgacggacggaccgtcgggaccttttattaccagggcacatacccctgggaggccccaattgacaatgtttatgtcagtgcggggagtcatacagtcgaaatcactgttactgcggataacggcacatgggacgtgtatgccgactacctggtgatacagtga

SEQ ID NO: 2968 - DNA, 2301 bp, Artificial Sequence
  Synthetic Construct, AT-125 intein modified protein encoding nucleic acids
atgcaaacaagcattactctgacatccaacgcatccggtacgtttgacggttactattacgaactctggaaggatactggcaatacaacaatgacggtctacactcaaggtcgcttttcctgccagtggtcgaacatcaataacgcgttgtttaggaccgggaagaaatacaaccagaattggcagtctcttggcacaatccggatcacgtactctgcgacttacaacccaaacgggaactcctacttgtgtatctatggctggtctaccaacccattggtcgagttctacatcgttgagtcctgggggaactggagaccgcctggtgcctgcatttcgggggatagcctcattagcctcgcctcaacgggcaagcgggtttcaatcaaggatctgctggatgagaaggatttcgagatctgggcgattaacgagcagaccatgaagctggagtctgctaaggtttcacgcgtgttctgcaccggcaagaagctggtgtacatcctcaagacgcggctggggcgcaccattaaggctacggccaaccacaggttcctcacgatcgacggctggaagcggctggatgagctgtcactcaaggagcatatcgccctcccaaggaagctggagtccagctcgctgcagctcatgtccgacgaggagctcggcctcctggggcacctgatcggcgatgggtgcaccctgcctaggcatgccatccagtacacgagcaacaagattgagctcgcggagaaggtggtcgagctggcgaaggctgtcttcggcgaccagatcaatccgaggatttcccaggagcggcagtggtaccaggtttacatcccggcgagctaccggctcacacacaacaagaagaatcccatcactaagtggctggagaacctcgacgtcttcggcctgcgcagctacgagaagttcgtgccgaatcaggtcttcgagcagccacagagggctatcgcgattttcctgcgccatctctggtcgacagacgggtgcgttaagctcatcgtggagaagtcttcacgccccgttgcttactacgccacttccagcgagaagctggctaaggacgtgcagtccctcctgctcaagctcggcatcaacgcgcgcctgtcaaagatttcccagaacggcaaggggagggataattaccacgtgacaatcactggccaggccgacctccagatcttcgtcgatcagattggggctgttgacaaggataagcaggcctccgtcgaggagatcaagacacacattgcgcagcatcaggctaacactaatagggacgtgatcccaaagcagatttggaagacatacgtcctgcctcagatccagattaagggcatcaccacgcgcgatctccagatgaggctgggcaacgcttactgcgggacggctctctacaagcacaatctgtcgcgcgagagggctgctaagatcgctaccattacgcagtctccggagatcgagaagctctcgcagtctgacatctactgggatagcatcgtgtcgattacagagactggcgtcgaggaggttttcgatctcactgttccagggccacataacttcgttgctaatgacatcatcgtgcataatacgtccctgggccaagtgacaatcgatggcgggacctacgacatctataggacgacacgcgtcaaccagccttccattgtggggacagccacgttcgatcagtactggagcgtgcgcacctctaagcggacttcaggaacagtgaccgtgaccgatcacttccgcgcctgggcgaaccggggcctgaacctcggcacaatagaccaaattacattgtgcgtggagggttaccaaagctctggatcagccaacatcacccagaacaccttctctcagggctcttcttccggcagttcgggtggctcatccggctccacaacgactactcgcatcgagtgtgagaacatgtccttgtccggaccctacgttagcaggatcaccaatccctttaatggtattgcgctgtacgccaacggagacacagcccgcgctaccgttaacttccccgcaagtcgcaactacaatttccgcctgcggggttgcggcaacaacaataatcttgcccgtgtggacctgaggatcgacggacggaccgtcgggaccttttattaccagggcacatacccctgggaggccccaattgacaatgtttatgtcagtgcggggagtcatacagtcgaaatcactgttactgcggataacggcacatgggacgtgtatgccgactacctggtgatacagtga

SEQ ID NO: 2969 - DNA, 2319 bp, Artificial Sequence
  Synthetic Construct, AT-126 intein modified protein encoding nucleic acids
atgcaaacaagcattactctgacatccaacgcatccggtacgtttgacggttactattacgaactctggaaggatactggcaatacaacaatgacggtctacactcaaggtcgcttttcctgccagtggtcgaacatcaataacgcgttgtttaggaccgggaagaaatacaaccagaattggcagtctcttggcacaatccggatcacgtactctgcgacttacaacccaaacgggaactcctacttgtgtatctatggctggtctaccaacccattggtcgagttctacatcgttgagtcctgggggaactggagaccgcctggtgcctgcttctcgggggatactctcgtcgcgctgacagacgggcggtcggtttctttcgagcagctcgtggaggaggagaagcagggcaagcagaatttctgctacacaatccggcacgacggctcgattggggtggagaagatcattaatgctcgcaagacaaagactaacgccaaggttatcaaggtgacactcgacaacggcgagtctatcatttgcactcccgaccacaagttcatgctgagggatgggagctacaagtgcgccatggatctcacgctggacgattcgctcatgcctctgcatcgcaagatctcgaccacggaggactctggcatcaccattgatgggtacgagatggtgtggtccccgaggtccgacagctggctcttcacgcacctggtcgccgattggtacaaccggtggcagggcatctacattgcggaggagaagcagcattgccaccataaggacttcaataagcgcaacaataacccggataacctcatcaggctgtctcccgagaagcacctcgccctgcaccggaagcatatttcaaagacactccaccgcccagacgtggtcgagaagtgccgcaggatccatcagtcccctgagttccggcgcaagatgtcagcgaggatgcagtccccggagactcgggctatcctcagcaagcaggctcaggcccagtggcagaatgagacctacaagctgacgatgatggagtcgtggaggtctttctacgacagcaacgaggattacaggcagcagaatgctgagcagctcaacagggctcagcaggagtactgggctcaggctgagaacaggaccgctcaggctgagcgcgttaggcagcatttcgctcagaatccgggcctgcgccagcagtactcggagaacgcggtgaagcagtggaataaccccgagctcctgaagtggcggcagaagaagacaaaggagcagtggactccagagttccgcgagaagaggagggaggctctcgctcagacctactacaggaagacgctcgccgcgctgaagcaggtcgagatcgagaacgggtacctggacatttcagcctacgattcctaccgcatcagcaccaaggacaagtccctcctgcggttcgatcgcttctgcgagaggtacttcgagaatgacgagaacctcgcgcgcgaggctgtcctgaattacaaccacaggatcgtcaacattgaggcggtttccgagacgatcgacgtttacgacattgaggttccacatacgcataacttcgctctcgcttcaggggttttcgttcataatacgtccctgggccaagtgacaatcgatggcgggacctacgacatctataggacgacacgcgtcaaccagccttccattgtggggacagccacgttcgatcagtactggagcgtgcgcacctctaagcggacttcaggaacagtgaccgtgaccgatcacttccgcgcctgggcgaaccggggcctgaacctcggcacaatagaccaaattacattgtgcgtggagggttaccaaagctctggatcagccaacatcacccagaacaccttctctcagggctcttcttccggcagttcgggtggctcatccggctccacaacgactactcgcatcgagtgtgagaacatgtccttgtccggaccctacgttagcaggatcaccaatccctttaatggtattgcgctgtacgccaacggagacacagcccgcgctaccgttaacttccccgcaagtcgcaactacaatttccgcctgcggggttgcggcaacaacaataatcttgcccgtgtggacctgaggatcgacggacggaccgtcgggaccttttattaccagggcacatacccctgggaggccccaattgacaatgtttatgtcagtgcggggagtcatacagtcgaaatcactgttactgcggataacggcacatgggacgtgtatgccgactacctggtgatacagtga

SEQ ID NO: 2970 - DNA, 2274 bp, Artificial Sequence
  Synthetic Construct, AT-127 intein modified protein encoding nucleic acids
atgcaaacaagcattactctgacatccaacgcatccggtacgtttgacggttactattacgaactctggaaggatactggcaatacaacaatgacggtctacactcaaggtcgcttttcctgccagtggtcgaacatcaataacgcgttgtttaggaccgggaagaaatacaaccagaattggcagtctcttggcacaatccggatcacgtactctgcgacttacaacccaaacgggaactcctacttgtgtatctatggctggtctaccaacccattggtcgagttctacatcgttgagtcctgggggaactggagaccgcctggtgcctgcatttctatggactctatgattctgacaactgagggctacaagtcgctgcaggagattttcgagacacagggggttaaggtggacaacaaggagaaggttatcgagctgaagtacccgctcattaatcggtacggcgacgtggagtacacctcccacttcacgaagaacggggagaagccaacaaagcgcatcaagactaataagggcattgagctggttaacacatacaatcatcctctcctggtgagggaggggttcaacctgatctggaagaagagcgaggacatcgaagtgggcgatattctcgtgtcccgcgtgggcgaccaccagttcgggaacaataacactgtggagaacgaggaggaggcttacgctctgggctgcatggtcgcggattcttacctggggtcatactcccggctcagcttctcgaacgacaagaaggagatcctcgataaggtctcaaagttctggaacaccttctccaataaggaggtttactacgacacctacaaggagtccaaggggatcacgattcacctgcatgacacaaacaagactaaggagttccatgataagtacaagatcgagtacggcgtcgctaaggacaagaagatcccgaagtgcattatggagagccccgagaacatccagctggccttcgtctcgggctacctggagtgcgagtccagcatctctgagaagaacctggaggttacctctgcttcaaaggacctcctgaaggatctccagctgatcctctcgaacatcggcattgtgtctacgaataaggagaaggtggtcaagaagtacaagcacaacaagtactaccggctgatcgtcaatcgcaaggagctcattaagctcctgccgctcctgaggttcgagacgcagcagcggaagaaccagaaggagaatttcctcagcaataacacaaagatcaagtcgtcttacggcaacactattgaggggtcacgctacctcctgaagaagtacagggactccctgaatatcgataagaaggagttctccaagtacctcagccgggacaccatcacgattgatcgcctgagggaggtcatctcgctctacccggacggcgataaggagattcgcgagctgttcgagaacgttgtgaataacaatatctactaccagaaggtggagcaggtcctggagggcgagatcattcccaccttcgacgtttgcatgcctaagactcattccttcatcgccaacacaatcgtcaaccacaacacgtccctgggccaagtgacaatcgatggcgggacctacgacatctataggacgacacgcgtcaaccagccttccattgtggggacagccacgttcgatcagtactggagcgtgcgcacctctaagcggacttcaggaacagtgaccgtgaccgatcacttccgcgcctgggcgaaccggggcctgaacctcggcacaatagaccaaattacattgtgcgtggagggttaccaaagctctggatcagccaacatcacccagaacaccttctctcagggctcttcttccggcagttcgggtggctcatccggctccacaacgactactcgcatcgagtgtgagaacatgtccttgtccggaccctacgttagcaggatcaccaatccctttaatggtattgcgctgtacgccaacggagacacagcccgcgctaccgttaacttccccgcaagtcgcaactacaatttccgcctgcggggttgcggcaacaacaataatcttgcccgtgtggacctgaggatcgacggacggaccgtcgggaccttttattaccagggcacatacccctgggaggccccaattgacaatgtttatgtcagtgcggggagtcatacagtcgaaatcactgttactgcggataacggcacatgggacgtgtatgccgactacctggtgatacagtga

SEQ ID NO: 2971 - DNA, 2094 bp, Artificial Sequence
  Synthetic Construct, AT-128 intein modified protein encoding nucleic acids
atgcaaacaagcattactctgacatccaacgcatccggtacgtttgacggttactattacgaactctggaaggatactggcaatacaacaatgacggtctacactcaaggtcgcttttcctgccagtggtcgaacatcaataacgcgttgtttaggaccgggaagaaatacaaccagaattggcagtctcttggcacaatccggatcacgtactctgcgacttacaacccaaacgggaactcctacttgtgtatctatggctggtctaccaacccattggtcgagttctacatcgttgagtcctgggggaactggagaccgcctggtgcctgccatcctgcggacactaaggtcatcgtgaagggcaagggcatcgttaatatctcggacgtgaaggagggggactacattctcggcatcgacggctggcagcgggtcaagaaggtttggaagtaccactacgagggcaagctcatcaacattaatgggctgaagtgcacgccgaaccataaggttcccgtggtcacagagaatgacaggcagactcgcatcagggattccctcgccaagagcttcctgtcgggcaaggtcaaggggaagatcattaccacgaagctcttcgagaagatcgcggagttcgagaagaacaagccgtcggaggaggagatcctcaagggcgagctgtctgggatcattctggccgagggcaccctcctgaggaaggacatcgagtacttcgattccagccgggggaagaagcgcattagccaccagtaccgggtggagatcacgattggcgagaacgagaaggagctcctggagcggatcctctacattttcgacaagctgttcggcatccgcccatcggtgaagaagaagggggataccaacgcgctcaagatcacaactgctaagaaggccgtctacctgcagatcgaggagctcctgaagaatattgagtcactctacgcccctgcggttctgcgcggcttcttcgagagggacgctaccgtgaacaagatccgctctacgattgttgtgacccagggcacgaacaataagtggaagatcgacattgtcgcgaagctcctggattccctcggcatcccatacagccgctacgagtacaagtacattgagaatgggaaggagctcacaaagcatatcctggagattactggcagggatgggctcatcctgttccagacactcgtcggcttcatttcgtctgagaagaacgaggcgctggagaaggctatcgaggttagggagatgaaccggctcaagaacaattctttctacaatctgtcaaccttcgaggtgtcatccgagtactacaagggcgaggtctacgatctcactctggagggcaatccttactacttcgccaatggcatcctcacacataatacgtccctgggccaagtgacaatcgatggcgggacctacgacatctataggacgacacgcgtcaaccagccttccattgtggggacagccacgttcgatcagtactggagcgtgcgcacctctaagcggacttcaggaacagtgaccgtgaccgatcacttccgcgcctgggcgaaccggggcctgaacctcggcacaatagaccaaattacattgtgcgtggagggttaccaaagctctggatcagccaacatcacccagaacaccttctctcagggctcttcttccggcagttcgggtggctcatccggctccacaacgactactcgcatcgagtgtgagaacatgtccttgtccggaccctacgttagcaggatcaccaatccctttaatggtattgcgctgtacgccaacggagacacagcccgcgctaccgttaacttccccgcaagtcgcaactacaatttccgcctgcggggttgcggcaacaacaataatcttgcccgtgtggacctgaggatcgacggacggaccgtcgggaccttttattaccagggcacatacccctgggaggccccaattgacaatgtttatgtcagtgcggggagtcatacagtcgaaatcactgttactgcggataacggcacatgggacgtgtatgccgactacctggtgatacagtga

SEQ ID NO: 2972 - DNA, 2628 bp, Artificial Sequence
  Synthetic Construct, AT-129 intein modified protein encoding nucleic acids
atgcaaacaagcattactctgacatccaacgcatccggtacgtttgacggttactattacgaactctggaaggatactggcaatacaacaatgacggtctacactcaaggtcgcttttcctgccagtggtcgaacatcaataacgcgttgtttaggaccgggaagaaatacaaccagaattggcagtctcttggcacaatccggatcacgtactctgcgacttacaacccaaacgggaactcctacttgtgtatctatggctggtctaccaacccattggtcgagttctacatcgttgagtcctgggggaactggagaccgcctggtgcctctatcctgcctaacgagtggctgcccatcatcgagaacggggaggtgaagttcgtgaagatcggggagttcattgatcgctacatggaggagcagaaggacaaggtgcgcacagtcgataacactgaggttctggaggtggacaatatcttcgccttctccctgaacaaggagtctaagaagtcagagatcaagaaggtgaaggccctcattcgccacaagtacaagggcgaggcgtacgaggtcgagctcaactccggccgcaagatccacattacaagggggcattctctcttcactatcaggaacggcaagatcaaggagatttggggcgaggaggttaaggtcggggacctcatcattgttccgaagaaggtgaagctgaatgagaaggaggctgtgatcaacattccagagctgatctctaagctccctgacgaggatacagccgacgtggtcatgaccacgcccgtcaagggcaggaagaatttcttcaaggggatgctccggaccctgaagtggatcttcggcgaggagtcaaagcggattcgcacgttcaacaggtacctcttccatctggaggagctcggcttcgtgaagctcctgccgaggggctacgaggtcaccgactgggagggcctgaagaggtaccggcagctgtacgagaagctcgtgaagaatctgcgctacaacggcaataagcgggagtacctggttcgcttcaacgacatcaaggattcagtgtcctgcttcccccgcaaggagctggaggagtggaagatcggcacaaggaaggggttccgcaggaagtgcattctcaaggttgacgaggatttcggcaagttcctggggtactacgtctcggagggctacgctggggctcagaagaacaagactggcgggatgagctactcggtcaagctctacaacgagaatccaaacgttctgaaggacatgaagaatatcgcggagaagttcttcggcaaggtccgggttgggaagaactgcgtggatattcctaagaagatggcttacctcctggctaagagcctgtgcggcgtcaccgctgagaacaagaggatcccgtcgatcattttcgactccagcgagcccgtgaggtgggcgttcctcagggcttacttcgtcggcgacggggatattcacccatccaagcgcctcaggctgtccacgaagagcgagctcctggccaatcagctcgtcttcctcctgaactcactgggcgtttcgtctatcaagattggcttcgactccggggtctaccgggtttacatcaacgaggatctgcctttcctccagacctcccgccagaagaatacgtactacccgaacctcatccccaaggaggtgctggaggagattttcggccgcaagttccagaagaacatcacgttcgagaagttcaaggagctcgcggacagcgggaagctggataagaggaaggtgaagctcctggacttcctcctgaatggcgacatcgtcctcgatcgggtgaagaacgtcgagaagcgcgagtacgagggctacgtgtacgatctctcagtggaggataatgagaatttcctcgtgggcttcggcctgctctacgctcataatacgtccctgggccaagtgacaatcgatggcgggacctacgacatctataggacgacacgcgtcaaccagccttccattgtggggacagccacgttcgatcagtactggagcgtgcgcacctctaagcggacttcaggaacagtgaccgtgaccgatcacttccgcgcctgggcgaaccggggcctgaacctcggcacaatagaccaaattacattgtgcgtggagggttaccaaagctctggatcagccaacatcacccagaacaccttctctcagggctcttcttccggcagttcgggtggctcatccggctccacaacgactactcgcatcgagtgtgagaacatgtccttgtccggaccctacgttagcaggatcaccaatccctttaatggtattgcgctgtacgccaacggagacacagcccgcgctaccgttaacttccccgcaagtcgcaactacaatttccgcctgcggggttgcggcaacaacaataatcttgcccgtgtggacctgaggatcgacggacggaccgtcgggaccttttattaccagggcacatacccctgggaggccccaattgacaatgtttatgtcagtgcggggagtcatacagtcgaaatcactgttactgcggataacggcacatgggacgtgtatgccgactacctggtgatacagtga

SEQ ID NO: 2973 - DNA, 6972 bp, Artificial Sequence
  Synthetic Construct, AT-130 intein modified protein encoding nucleic acids
atgcaaacaagcattactctgacatccaacgcatccggtacgtttgacggttactattacgaactctggaaggatactggcaatacaacaatgacggtctacactcaaggtcgcttttcctgccagtggtcgaacatcaataacgcgttgtttaggaccgggaagaaatacaaccagaattggcagtctcttggcacaatccggatcacgtactctgcgacttacaacccaaacgggaactcctacttgtgtatctatggctggtctaccaacccattggtcgagttctacatcgttgagtcctgggggaactggagaccgcctggtgcctgcgcggcctacgatactctcgtgctgcagaaggacgggtcgctggttacgctggcggaggtttacaagcggcaggagattgagctgctcacactgggcaagaacagcaagttctacctcactaagccatcggccttcattgacgatggcatcaagcctattttccgcgtcaccacgaagctcgggaggttcgtggagacaactatcacccacccgttcctgaccgtgaacggctggaagcccctcagcaagctgcaggtcggggagaagattgccgtgccccgcaggctcaacattttcgggaatgagaccatctcggagtctaagttctccagcctgatcaacttcgacaatctctacctgttcccgctcgtgttccagctggagcggtcgcagctcgcgctgttcattcgctacctcttcagcctggatggctgggtgaagatctaccagaacaagatcgtctgcttcgggtactcaaccgtgtccgagaagctgatcaggcagattcagcacatcctcctgcggttcggcattgtctccgggatcgagaagttcgaggagaagcggacggagaagatcaaggtggtcaaggaggtgaagagccagcggtcgcaccgcgaggagttcacattcgctacttaccgcaactgctactgcgacggcaagtggcacctcaccattacggatgccctctcccagaagaacctgatggaggacatcggcgggttcgatagcaagaacttctacctgttcgacctcctgcagccgcacaacagcggcaatcaggagctggagaaccatctgatcttctgggatgagctcgttaatgtgctggcgaagttcgccgcgtctaagaaccagtcactcaagaatcgcaccgctaaggggaagtcccccaagaacagcgagaatctgaccacgacagagacgatttgcaggaagaacatcctcgccaacatggagaatctgccgagcgacaaccagaatttcgattcggagaagctcgacctgtctcagccccacaactcagggaaccaggagctggagaatcatctgatcttctgggacgagctcgtcaatgttctggccaagttcgcgacctcgaagaaccagtctctcaagaataggactaccaagcggaactcaccgaagaactccgagaatctgacgacaactgagaccatctgcaggaagaacattctggcgaacatggagaatctgccctctgataaccagaatttcgactcagagaagctcgatctgccgcagccccacaactccgggaatcaagaactggagaatcatctgatcttctgggacgaactcgtgaatgtcctggctaagttcgctgccagcaagaaccagtcgctcaagaatcgcaccacgaagaggaactctccaaagaactcagagaatctgacaactaccgagaccatttgccggaagaacattctggctaatatggagaatctgccttctgacaatcagaatttcgatagcgagaagctcgacctgccacagcctcataattccgggaatcaagagctggagaatcatctgatcttctgggacgaattagttaacgtgctggctaagttcgccacatccaagaaccagagcctcaagaaccggacgacaaagcgcaactcgccgaagaactctgagaatctgactaccacggagactatttgccgcaagaacattctggctaacatggagaatctgccatcggacaatcagaatttcgactctgagaagctcgatctgtcccagcctcacaacagcggcactcaggaactggagaaccatctgatcttctgggacgaactagtcaacgtcctcgccaagttcgcggcttcaaagaaccagtccctcaagaatcggacagcgaaggggaagagcccgaagaactcggagaatctgaccaccaccgagaccatctgccgcaagaacatcctcgcgaacatggaaaatctgccgtcagataatcagaatttcgattccgagaagctcgacctgtcgcagccccacaactctgggaatcaggaactggagaatcatctgatcttctgggacgaactggtgaacgtcctggcgaagttcgctacctctaagaaccagtccctgaagaataggacgacaaagcggaactccccgaagaacagcgaaaatctgaccactacggagaccatttgcaggaagaacattctcgcgaatatggagaatctgcccagcgataatcagaacttcgactcggagaagctggatctgcctcagccccacaactctggcaaccaagaactggagaaccatctgatcttctgggacgaacttgttaacgtgctggccaagttcgcgacatcgaagaaccaatccctgaaaaatcgcacaactaagaggaactcaccaaagaactccgaaaatctgactaccacagagactatttgccggaagaacatcctggccaatatggagaatctgccgtctgacaaccagaacttcgactccgagaagctggacctgccacagcctcacaacagcgggaatcaggagctggagaatcatctgatcttctgggacgaactagtaaacgttctggctaagttcgccactagcaagaaccaatccctcaagaatcggactaccaagcgcaactctccgaagaactcagaaaatctgaccaccactgagactatctgcaggaagaacatcctggcgaatatggaaaatctgccctccgataatcagaatttcgactccgagaagctcgatctgcctcagccgcataactctgggaatcaggagctggagaaccatctgatcttctgggacgaactagtgaatgtgctcgccaagttcgctacctccaagaaccaatccttaaagaataggaccacgaagcggaactcgccaaagaactctgaaaatctgaccacaaccgagaccatttgccgcaagaacatcctggccaacatggaaaatctgccttcggataatcagaacttcgattccgaaaaactggacctgccgcagccgcataattccgggaatcaggagctggagaaccatctgatcttctgggacgaactagttaatgtcctggccaagttcgcgacgtcaaagaaccagagcctgaagaatcgcacgacaaagaggaacagccctaagaactcggaaaatctgaccacaacggagacaatctgtaggaagaacattctggcaaatatggagaatctgccatcagacaatcagaacttcgacagcgagaagctcgatctgtcacagcctcacaactccggcacacaagaactggagaaccatctgatcttctgggacgaactagtaaatgttctcgccaagttcgcggcctctaagaaccaaagcctgaaaaatcggacaactaagcgcaactcccctaagaacagcgaaaatctgacaacgacagagacaatctgccgcaagaacattctcgcaaacatggaaaatctgccatctgataatcagaacttcgatagcgaaaaactggacctgccacagccacacaactccggcacgcaagaactggagaatcatctgatcttctgggacgaactagtaaacgtactggccaagttcgctgcgtcgaagaaccagtccttaaaaaaccgcaccactaagcggaactcacctaagaactccgaaaatctgaccacgactgagactatatgtaggaagaacatcttagccaacatggaaaatctgcccagcgacaatcaaaactttgactccgagaagctggatctgccgcagccgcataactccgggaatcaggagctggagaaccatctgatcttctgggacgaactagtaaacgtcctggctaagttcgccgctagcaagaaccagtccctgaaaaacaggactaccaagaggaactctcctaagaactcagaaaatctgactaccactgaaactatctgtcgcaagaacatcctggctaatatggaaaatctgccgtcggataaccagaacttcgattccgagaaactggacctgcctcagccgcacaattctggcaaccaagagctggagaaccatctgatcttctgggacgaactagtaaacgtgctcgccaagttcgccacctccaagaaccagtccctgaaaaataggaccacaaagcgcaactcgcctaagaactctgaaaatctgacaaccacggagacaatctgcaggaagaacatactcgcgaacatggagaatctgccttcggacaaccagaacttcgattcagagaagctggatctgccccagccgcataattccggcaaccaggaactggagaatcatctgatcttctgggacgaactagtaaacgtattagcgaagttcgctacctcaaagaaccaaagcctcaaaaataggacggccaaggggaagagccctaagaactcggagaatctgactaccactgagactatatgtcggaagaacatcctcgcaaacatggagaatctgcccagcgataaccagaatttcgattctgagaagctggacctgccgcagcctcataattctggtaaccaagagctggagaatcatctgatcttctgggacgaactagtaaacgtactagccaagttcgcgacctctaagaaccagagcctgaaaaaccgcaccaccaagcggaactccccaaagaacagcgaaaatctgactactaccgagacgatatgtcgcaagaacattctcgctaatatggaaaatctgccatcggacaaccaaaacttcgactccgaaaaactcgatctgccgcagccgcacaattccggtaaccaggagctggagaaccatctgatcttctgggacgaactagtaaacgtactcgctaagttcgccacttcgaagaaccagtcccttaaaaacaggaccaccaagaggaactcacccaagaactccgaaaatctgacgaccaccgaaaccatctgtaggaagaacatactggctaatatggaaaatctgccttctgacaaccagaatttcgacagtgaaaaactggacctgccccagccgcataactctggtaaccaagagctggagaatcatctgatcttctgggacgaactagtaaacgtacttgcgaagttcgctacaagcaagaaccagtccctcaaaaatcgcactgccaaggggaagtctccgaagaactcagagaatctgaccacgaccgagactatttgtaggaagaacatcctggccaacatggagaatctgcccagtgacaatcaaaactttgatagcgaaaaactggatctgccgcagccacacaactccgggaatcaggagctggagaaccacctgatcttctgggatgaactggttaacgttctcgcgaagttcgccacttccaagaaccagtccctcaaaaacaggaccactaagcgcaactcgccaaagaactctgagaatctgacgaccacagagacgatatgccgcaagaacattttagcgaatatggaaaatctgcccagcgacaatcagaactttgactccgaaaagctggacctgcctcagcctcataattctggaaaccaagaactggagaaccacctgatcttctgggacgaactagtaaacgtactagcaaagttcgccacctcaaagaaccagagcctgaaaaatcgcaccacaaagcggaacagcccaaagaactcggaaaatctgactactactgagacgatttgtcgcaagaacattttggcgaatatggagaatctgccaagcgataatcaaaacttcgattctgaaaaactcgatctgcctcagccacataattccggcacccaggagctggagaactccgacatcttctgggataagattgtgtccatcgagccggtcggggagaagcaggtgtacgatctcactgttccagagactcataacttcgttgctaatgatatttgcctccataatacgtccctgggccaagtgacaatcgatggcgggacctacgacatctataggacgacacgcgtcaaccagccttccattgtggggacagccacgttcgatcagtactggagcgtgcgcacctctaagcggacttcaggaacagtgaccgtgaccgatcacttccgcgcctgggcgaaccggggcctgaacctcggcacaatagaccaaattacattgtgcgtggagggttaccaaagctctggatcagccaacatcacccagaacaccttctctcagggctcttcttccggcagttcgggtggctcatccggctccacaacgactactcgcatcgagtgtgagaacatgtccttgtccggaccctacgttagcaggatcaccaatccctttaatggtattgcgctgtacgccaacggagacacagcccgcgctaccgttaacttccccgcaagtcgcaactacaatttccgcctgcggggttgcggcaacaacaataatcttgcccgtgtggacctgaggatcgacggacggaccgtcgggaccttttattaccagggcacatacccctgggaggccccaattgacaatgtttatgtcagtgcggggagtcatacagtcgaaatcactgttactgcggataacggcacatgggacgtgtatgccgactacctggtgatacagtga

SEQ ID NO: 2974 - DNA, 2298 bp, Artificial Sequence
  Synthetic Construct, AT-131 intein modified protein encoding nucleic acids
atgcaaacaagcattactctgacatccaacgcatccggtacgtttgacggttactattacgaactctggaaggatactggcaatacaacaatgacggtctacactcaaggtcgcttttcctgccagtggtcgaacatcaataacgcgttgtttaggaccgggaagaaatacaaccagaattggcagtctcttggcacaatccggatcacgtactctgcgacttacaacccaaacgggaactcctacttgtgtatctatggctggtctaccaacccattggtcgagttctacatcgttgagtcctgggggaactggagaccgcctggtgcctgcctctcggggtctacaaaggtcattgacgctgctacggggaatctcttctcgctcaaggagatcgccgctcagcctgagtactggctctcgcgcaaggtcttctctctcgacctgaagtcacagcaggtggtccagcagccaatcaccgagattcaccctaatggcgtgagggatgtctggcagatcaccacgaggaccaacaggaaggtgtgcgctacggacgatcatctcttctacacagtcctgggctggaagccgctcaaggacttcagcgttggcgatcgcctcgggctgccgaataagatccccattaactacaggtcccagatctccgacagcaaggtgaagttcacggcgtacctcattggcgaggggtacctgtacacaaattcgttctcttgctcatacttctgcaactccgacggggagctcatcgcggatttctacggctgcgctgaggagctgttcgggtccagcgctccaatcgagaagcagctccacctgggcaataagtccgtgatctacgtgcggatcggcctcatttccgggctgaagaactgggtcgactcctacctccagtgcgcgaatagccgcgtgcaggagatccccaactggattttctccctcagccagtcgcagctccagctgttcctcggcatcctgtggtctacgtcagggatcttcgacgagacaattggctacacttactactcgtctaacagcgaggtcctggttaggcaggtccagcatctgttcctccggctgggcatcgtttccctcttcaacgtcaataaggttaagggccagggggagctggacgtgtcctacgttgtggaggtccgcgggagggaggatatgctgaagttctacaagctcatcaagccgtacctgtcatcctacaagcagggcctctgcgagagctgctacctggtcattaagtaccagcagtcgtaccagttcaagtacttcctcactcccgacttcttcgatctgatcgtgaaggctaagaaggccagctcgatgaccagggctctcggcgtttgcggcggggagatctcttcagtgtggaacttccagaatacatctaaccggtccctgagcttcgacaagttcaacaatttctcgactgtcctcgcggatgaggagctgaccgccatcgcgaactcggacgtgttctgggatgagatcatttctatcgagtacattggcaaggaggaggtgttcgatctcactattccagagactcataacttcattgctaatgacttcatcgtgcataatacgtccctgggccaagtgacaatcgatggcgggacctacgacatctataggacgacacgcgtcaaccagccttccattgtggggacagccacgttcgatcagtactggagcgtgcgcacctctaagcggacttcaggaacagtgaccgtgaccgatcacttccgcgcctgggcgaaccggggcctgaacctcggcacaatagaccaaattacattgtgcgtggagggttaccaaagctctggatcagccaacatcacccagaacaccttctctcagggctcttcttccggcagttcgggtggctcatccggctccacaacgactactcgcatcgagtgtgagaacatgtccttgtccggaccctacgttagcaggatcaccaatccctttaatggtattgcgctgtacgccaacggagacacagcccgcgctaccgttaacttccccgcaagtcgcaactacaatttccgcctgcggggttgcggcaacaacaataatcttgcccgtgtggacctgaggatcgacggacggaccgtcgggaccttttattaccagggcacatacccctgggaggccccaattgacaatgtttatgtcagtgcggggagtcatacagtcgaaatcactgttactgcggataacggcacatgggacgtgtatgccgactacctggtgatacagtga

SEQ ID NO: 2975 - DNA, 1425 bp, Artificial Sequence
  Synthetic Construct, AT-132 intein modified protein encoding nucleic acids
atgcaaacaagcattactctgacatccaacgcatccggtacgtttgacggttactattacgaactctggaaggatactggcaatacaacaatgacggtctacactcaaggtcgcttttcctgccagtggtcgaacatcaataacgcgttgtttaggaccgggaagaaatacaaccagaattggcagtctcttggcacaatccggatcacgtactctgcgacttacaacccaaacgggaactcctacttgtgtatctatggctggtctaccaacccattggtcgagttctacatcgttgagtcctgggggaactggagaccgcctggtgcctgcctgacttacgagacagagattatgacagtggagtacgggccgctgcctatcgggaagatcgtggagtaccgcattgagtgcacggtgtacacagtcgacaagaacggctacatctacactcagccgattgcccagtggcacaatcgcggcatgcaggaggtctacgagtactccctggaggatgggaccgttatcagggcgacgccggagcataagttcatgaccgaggacggccagatgctgcccatcgatgagattttcgagcggaacctcgacctgaagtgcctcgggaccctggagatggttaagattgtgagccgcaagctcgctaagacggagaatgtgtacgatattggggttacaaaggatcacaacttcgtgctcgctaatgggctcattgcttccaacacgtccctgggccaagtgacaatcgatggcgggacctacgacatctataggacgacacgcgtcaaccagccttccattgtggggacagccacgttcgatcagtactggagcgtgcgcacctctaagcggacttcaggaacagtgaccgtgaccgatcacttccgcgcctgggcgaaccggggcctgaacctcggcacaatagaccaaattacattgtgcgtggagggttaccaaagctctggatcagccaacatcacccagaacaccttctctcagggctcttcttccggcagttcgggtggctcatccggctccacaacgactactcgcatcgagtgtgagaacatgtccttgtccggaccctacgttagcaggatcaccaatccctttaatggtattgcgctgtacgccaacggagacacagcccgcgctaccgttaacttccccgcaagtcgcaactacaatttccgcctgcggggttgcggcaacaacaataatcttgcccgtgtggacctgaggatcgacggacggaccgtcgggaccttttattaccagggcacatacccctgggaggccccaattgacaatgtttatgtcagtgcggggagtcatacagtcgaaatcactgttactgcggataacggcacatgggacgtgtatgccgactacctggtgatacagtga

SEQ ID NO: 2976 - DNA, 2304 bp, Artificial Sequence
  Synthetic Construct, AT-133 intein modified protein encoding nucleic acids
atgcaaacaagcattactctgacatccaacgcatccggtacgtttgacggttactattacgaactctggaaggatactggcaatacaacaatgacggtctacactcaaggtcgcttttcctgccagtggtcgaacatcaataacgcgttgtttaggaccgggaagaaatacaaccagaattggcagtctcttggcacaatccggatcacgtactctgcgacttacaacccaaacgggaactcctacttgtgtatctatggctggtctaccaacccattggtcgagttctacatcgttgagtcctgggggaactggagaccgcctggtgcctcgctgacgggggatcagaaggtcctctactacatcgctaagaagctctactacgagacattcgctgagtgctacgaccgcattaacggcgacatctccagcgttagcgtgccatgcttcgatgagaactaccagacagtgattaagcctatctcggccatttggaagcaccatgtgaagaagaagggcttcaagattaagatcacttgggggaagcagattaagatcacagaggaccacagcctgttcactaggaacgagaacaataagccgcaggcggttttcggcaatgagatcaaggtcggcgatgagattgggatcccctcctacatctccttcctggagcagccgctggagcccttccatattaccgacaagattctcatccaggaggagatctacgtggagtcagaggacacgatctcctacattgagaagtacggcgataagatgcgggagtacctcctggcgaagtcgctgtctccgtcacagttctactccattctcaagacatacgaggctaagaaccagatcccgtggcacctgtggaagtacctggagctgcccctctccgagaaggacaaggtctgctacctcagcaagaaggccattaagaactggatcgataatgtcgaggagctcctgtggttcctgggcttctacgttgccaggggctcactgatcaagaacgaggtggtcctcaagggcgagccatcccagctggagaaggtcatcgagctcattgagaggatcttcgagtacaagagcgagatcaatgactcgggctacatttcgatcaagtctaagattctcgttgatctgatcggctacgggctcaacttcgggaatcaggagaaggacattccaaactggatcctgcagctccctgagcagcagctcatccggttcctgaagggcttcgtggctgggaacaacctggagaaccagctgaatttctacctggagttcaagacggactctcagctggtggcggagaagctggtcctcatcctgtcgaagttcggcctcgtcgctgacgtttctgagatcgaggttaacgaggaggatattgccaagatctaccgcatcattatcgagggcctggaggacaagaacatccataatctctctaaggtggagcagaagatttcagctctgaccacgggcgatatcgcttgggggaagattgagtccatcgaggagttcgagatcgacgattacgtctacgacttctctgttccaaactacgagaacttcatcgggggctcttacaatgttttcgctcataacacgtccctgggccaagtgacaatcgatggcgggacctacgacatctataggacgacacgcgtcaaccagccttccattgtggggacagccacgttcgatcagtactggagcgtgcgcacctctaagcggacttcaggaacagtgaccgtgaccgatcacttccgcgcctgggcgaaccggggcctgaacctcggcacaatagaccaaattacattgtgcgtggagggttaccaaagctctggatcagccaacatcacccagaacaccttctctcagggctcttcttccggcagttcgggtggctcatccggctccacaacgactactcgcatcgagtgtgagaacatgtccttgtccggaccctacgttagcaggatcaccaatccctttaatggtattgcgctgtacgccaacggagacacagcccgcgctaccgttaacttccccgcaagtcgcaactacaatttccgcctgcggggttgcggcaacaacaataatcttgcccgtgtggacctgaggatcgacggacggaccgtcgggaccttttattaccagggcacatacccctgggaggccccaattgacaatgtttatgtcagtgcggggagtcatacagtcgaaatcactgttactgcggataacggcacatgggacgtgtatgccgactacctggtgatacagtga

SEQ ID NO: 2977 - DNA, 1983 bp, Artificial Sequence
  Synthetic Construct, AT-134 intein modified protein encoding nucleic acids
atgcaaacaagcattactctgacatccaacgcatccggtacgtttgacggttactattacgaactctggaaggatactggcaatacaacaatgacggtctacactcaaggtcgcttttcctgccagtggtcgaacatcaataacgcgttgtttaggaccgggaagaaatacaaccagaattggcagtctcttggcacaatccggatcacgtactctgcgacttacaacccaaacgggaactcctacttgtgtatctatggctggtctaccaacccattggtcgagttctacatcgttgagtcctgggggaactggagaccgcctggtgcctgcgtttcgggggatacgctgctgattacaagggactctattcataagattaaggatgtcgtggggcagaagattgagatttggaatggcaagaactggtctcaggtcatcccgctgaagacagggaaggacaggaagctctaccgggttcgcttcggcgacgggtcgtacctggatgttaccgagtaccaccgcttcttcgtgaaggacaggttcggcaagaagtacgaggaggtgcagaccaaggatctcctgacgcactccaagtacgccctggacgtcgagccattcatcattgattaccatgacggcgattcgatcaacctctcttacgcttacacactgggggctgctctcggcaatgggactatcgaccagaactctaatggcaagattagggtgtactcacataaggccgagctgatcttcgcgggcaacaagtccctggagcggcagtacaattacctcccgagcttcgtggacgtcattgatctcggcttctcgggggagctcctgaggaggctgcagaccgagcccgacgctctcaacacgatcgcctcatggaataagtccgctatcctggccttcattgcgggcctcgctgacacagatgggagcgagactaagggcaacgggatcaagatttccgtgagcgactacgagagggccaagcggctgcagctcctgctcacgaagtgcggcattagggcgagcgtcaatctgatggcttcgcggggctgcaccacgaacctcggggagcgcaatcaggacctgtactacctccagatcaccgattgccgggagattccatgccagcgcctcgacacaactaaggtttgcgaggcgaagttccagggcaagtaccagaccatccagaacgtcgaggagctgcctggcctccacgatacgtactgcttcgaggagccagagttccacaagggggttttcggcaatgctctcacaggcaacacgtccctgggccaagtgacaatcgatggcgggacctacgacatctataggacgacacgcgtcaaccagccttccattgtggggacagccacgttcgatcagtactggagcgtgcgcacctctaagcggacttcaggaacagtgaccgtgaccgatcacttccgcgcctgggcgaaccggggcctgaacctcggcacaatagaccaaattacattgtgcgtggagggttaccaaagctctggatcagccaacatcacccagaacaccttctctcagggctcttcttccggcagttcgggtggctcatccggctccacaacgactactcgcatcgagtgtgagaacatgtccttgtccggaccctacgttagcaggatcaccaatccctttaatggtattgcgctgtacgccaacggagacacagcccgcgctaccgttaacttccccgcaagtcgcaactacaatttccgcctgcggggttgcggcaacaacaataatcttgcccgtgtggacctgaggatcgacggacggaccgtcgggaccttttattaccagggcacatacccctgggaggccccaattgacaatgtttatgtcagtgcggggagtcatacagtcgaaatcactgttactgcggataacggcacatgggacgtgtatgccgactacctggtgatacagtga

SEQ ID NO: 2978 - DNA, 2157 bp, Artificial Sequence
  Synthetic Construct, AT-135 intein modified protein encoding nucleic acids
atgcaaacaagcattactctgacatccaacgcatccggtacgtttgacggttactattacgaactctggaaggatactggcaatacaacaatgacggtctacactcaaggtcgcttttcctgccagtggtcgaacatcaataacgcgttgtttaggaccgggaagaaatacaaccagaattggcagtctcttggcacaatccggatcacgtactctgcgacttacaacccaaacgggaactcctacttgtgtatctatggctggtctaccaacccattggtcgagttctacatcgttgagtcctgggggaactggagaccgcctggtgcctgcctggacaagacggctctgcggattttcaatcaggggctgctctacgcggatgaggtcgtgacaccgggctcgggggagacagtcggcctcgggctgacggtcaggaacggcatcggggcgtccacagccattgcgaatcagccgatggagctggttgagatcaagctcgctaacggccggaagctgcgcatgacccctaatcaccggatgtccgtgaagggcaagtggattcatgcctgcaacctcaagccggggatgctcctggactacagcatcggcgagtaccagaagcgcgaggacaccctcctgattcctctccagctggaggattacactgaggtgaacaattcgcagaccctgggccacaacggcggggtcctcaccaagaagatcatgacgccggcgtcaatgacatccgacctggcttacttcctcggctgcctgttcggcaacgggtgcatcgtccagaataagtaccaggtttgcttctaccattctcggctcgacgtgctgtacggcctccaggagaaggggaagaagctgttcggcatcaaggggtctctcaacgatttcgccaatggcaggttcgagctgtgcttcgcgtcacggcagctcttctactggctccacctgaaccagctggtcaagacgcagaagtcagaggacctggagcgcatccccctctccctgaggaggtccagcagggttactctcctgtccttcttctgcggcctgattgacaccaacggctacgtgccacaggatggcaagctcagcatcgcttcggcctcgtctgatttcattcataacctgcagcagatcggcgagtccattgggctctgcttcagcatctaccagaatacgaagggggagaacctgcagaatcagcacaacaatacatggggcctctgcctgtctcccatgctctcaaacgtggacgcgctggattacctcaaccataatagcatcaagtgccaggagggcccggtggtcatttcgaagtgcgtcctcaactactcgccctacaagatcgagtctgttaatattggcgctgtgtgcgactacagctacgatttcgccatcgagggcatcaatgataatgactcttggtactggcagggggctctcaagtctcacaacacgtccctgggccaagtgacaatcgatggcgggacctacgacatctataggacgacacgcgtcaaccagccttccattgtggggacagccacgttcgatcagtactggagcgtgcgcacctctaagcggacttcaggaacagtgaccgtgaccgatcacttccgcgcctgggcgaaccggggcctgaacctcggcacaatagaccaaattacattgtgcgtggagggttaccaaagctctggatcagccaacatcacccagaacaccttctctcagggctcttcttccggcagttcgggtggctcatccggctccacaacgactactcgcatcgagtgtgagaacatgtccttgtccggaccctacgttagcaggatcaccaatccctttaatggtattgcgctgtacgccaacggagacacagcccgcgctaccgttaacttccccgcaagtcgcaactacaatttccgcctgcggggttgcggcaacaacaataatcttgcccgtgtggacctgaggatcgacggacggaccgtcgggaccttttattaccagggcacatacccctgggaggccccaattgacaatgtttatgtcagtgcggggagtcatacagtcgaaatcactgttactgcggataacggcacatgggacgtgtatgccgactacctggtgatacagtga

SEQ ID NO: 2979 - DNA, 2421 bp, Artificial Sequence
  Synthetic Construct, AT-136 intein modified protein encoding nucleic acids
atgcaaacaagcattactctgacatccaacgcatccggtacgtttgacggttactattacgaactctggaaggatactggcaatacaacaatgacggtctacactcaaggtcgcttttcctgccagtggtcgaacatcaataacgcgttgtttaggaccgggaagaaatacaaccagaattggcagtctcttggcacaatccggatcacgtactctgcgacttacaacccaaacgggaactcctacttgtgtatctatggctggtctaccaacccattggtcgagttctacatcgttgagtcctgggggaactggagaccgcctggtgcctgcgtgctgcatgacactgagatctacgtgaatggcatggttatggaggcggagcagatttggcaggcttacgcgggggaggcggagttcgacggcgaggggttctggacagagccgaacaaggagctcctggttaatagcctcgatgagaccacgggcaagatcgtgttcgcccggattcgcaggctgtaccgccagtgggttagggagaagctcaggaaggtgcggctgaaggacggctccagcatcacaattacttgcaggcacaagctcttcatccgggactcctggaagaacgatttccaagtgggcgacgatgtctgcgttcccgcgaagctgatgtgggacgggaagccagaggacccagatgtggtcaagttcgtcgcttggcaggttgctgagggctgggagagggtcaattccggcatgttcggggttagccagaagggcaaggacgtgctggaggggctcctggaggtcttctcgcggctgggcaagcgctacgatatcaagattaactgcccaaaggttgtggcgcacgggtctaagaagaattgctacgagttcagcgctcattcgctggagtacaggaagttcctggaggagaagcgctacggctgggggaagaggtcccatgagaagaccatccctctgttcattatgcaggccgacctcgattcggtgcgggtcttcctgtctaactacttcgacgcggagggctgggtgaataagaccgttcgctgcgtggagatctccacggcctcgtctcagctcatccaggagctgagcattctcctgcggcgcttcggcgtctggatgaagatctcaccgcagcagaagtgcgctaccaacggcacgggggttttctgcacatactacatcgggactttcggcgggaatagcgccaggtgcttcctccaggagatcggcttcaacgacagcgggaagcaggagaatctgaagtcgatctgcgagaagattgcggactctaacgtggagggcatcccggcttcagatattgtggccgagctcgtcgagaagacccagctcccagtcggcagcctggggatccaggaccctatctacatggacggctgccaggatttctctcccacgtcactggagaaggtcatcaactcaattgaggatatcatttccggcgctggggaggaggagtacggccagctcaagtcatccaagctgaggaacaagacactggaggcttactcgctcctgaatatcctggagctggagatctacaagactcggctccagaagctcctgaaccaggaggtgtactactgccagatcgagtccattgaggagatggagtacgagggctgggtctacgacttcgaggtttccaagtaccacaatttcgttgctaacaacatcatttgccacaatacgtccctgggccaagtgacaatcgatggcgggacctacgacatctataggacgacacgcgtcaaccagccttccattgtggggacagccacgttcgatcagtactggagcgtgcgcacctctaagcggacttcaggaacagtgaccgtgaccgatcacttccgcgcctgggcgaaccggggcctgaacctcggcacaatagaccaaattacattgtgcgtggagggttaccaaagctctggatcagccaacatcacccagaacaccttctctcagggctcttcttccggcagttcgggtggctcatccggctccacaacgactactcgcatcgagtgtgagaacatgtccttgtccggaccctacgttagcaggatcaccaatccctttaatggtattgcgctgtacgccaacggagacacagcccgcgctaccgttaacttccccgcaagtcgcaactacaatttccgcctgcggggttgcggcaacaacaataatcttgcccgtgtggacctgaggatcgacggacggaccgtcgggaccttttattaccagggcacatacccctgggaggccccaattgacaatgtttatgtcagtgcggggagtcatacagtcgaaatcactgttactgcggataacggcacatgggacgtgtatgccgactacctggtgatacagtga

SEQ ID NO: 2980 - DNA, 2181 bp, Artificial Sequence
  Synthetic Construct, AT-137 intein modified protein encoding nucleic acids
atgcaaacaagcattactctgacatccaacgcatccggtacgtttgacggttactattacgaactctggaaggatactggcaatacaacaatgacggtctacactcaaggtcgcttttcctgccagtggtcgaacatcaataacgcgttgtttaggaccgggaagaaatacaaccagaattggcagtctcttggcacaatccggatcacgtactctgcgacttacaacccaaacgggaactcctacttgtgtatctatggctggtctaccaacccattggtcgagttctacatcgttgagtcctgggggaactggagaccgcctggtgcctcggttacgggggatactgaggttactattaggcggaatgggcggattgagttcgtccctattgagaagctgttcgagcgggtggatcaccgggtgggggagaaggagtactgcgtgctcggcggggtcgaggctctcacactggacaacaggggcaggctggtctggaagaaggtcccatacgttatgaggcacaagactgataagaggatctaccgggtgtggttcacaaactcctggtacctcgacgtcactgaggatcattcactcatcggctacctgaatacctccaaggttaagccagggaagccactcaaggagaggctggtggaggtcaagccagaggagctcggcgggaaggtcaagtccctgatcaccccaaaccgccctatcgccaggacgattaaggccaatcctatcgcggttaagctctgggagctgattggcctcctggtgggcgacgggaactggggcgggcagagcaattgggcgaagtactacgtgggcctctcgtgcgggctggataaggctgagatcgagcgcaaggtcctcaacccgctgagggaggcctcggttatttctaattactacgacaagtccaagaagggcgatgtctcaatcctctccaagtggctggcggggttcatggttaagtacttcaaggacgagaacggcaataaggctatcccgtctttcatgttcaacctcccccgggagtacattgaggctttcctcaggggcctgttctccgctgacgggaccgtgagcctgaggaggggcatcccggagattaggctcacgtcggttaaccgggagctgtctgatgcggtgcgcaagctcctgtggctcgttggcgtgtccaacagcctgttcaccgagacgaagcccaatcgctacctggagaaggagagcggcacccactcgatccatgtcaggattaagaacaagcaccggttcgccgaccgcatcggcttcctgattgataggaagtctacaaagctctcagagaacctgggcgggcatactaataagaagagggcgtacaagtacgacttcgatctggtgtacccgcggaagatcgaggagattacgtacgacggctacgtctacgatattgaggttgagggcacacataggttcttcgctaatggcattctcgttcataatacgtccctgggccaagtgacaatcgatggcgggacctacgacatctataggacgacacgcgtcaaccagccttccattgtggggacagccacgttcgatcagtactggagcgtgcgcacctctaagcggacttcaggaacagtgaccgtgaccgatcacttccgcgcctgggcgaaccggggcctgaacctcggcacaatagaccaaattacattgtgcgtggagggttaccaaagctctggatcagccaacatcacccagaacaccttctctcagggctcttcttccggcagttcgggtggctcatccggctccacaacgactactcgcatcgagtgtgagaacatgtccttgtccggaccctacgttagcaggatcaccaatccctttaatggtattgcgctgtacgccaacggagacacagcccgcgctaccgttaacttccccgcaagtcgcaactacaatttccgcctgcggggttgcggcaacaacaataatcttgcccgtgtggacctgaggatcgacggacggaccgtcgggaccttttattaccagggcacatacccctgggaggccccaattgacaatgtttatgtcagtgcggggagtcatacagtcgaaatcactgttactgcggataacggcacatgggacgtgtatgccgactacctggtgatacagtga

SEQ ID NO: 2981 - DNA, 2280 bp, Artificial Sequence
  Synthetic Construct, AT-138 intein modified protein encoding nucleic acids
atgcaaacaagcattactctgacatccaacgcatccggtacgtttgacggttactattacgaactctggaaggatactggcaatacaacaatgacggtctacactcaaggtcgcttttcctgccagtggtcgaacatcaataacgcgttgtttaggaccgggaagaaatacaaccagaattggcagtctcttggcacaatccggatcacgtactctgcgacttacaacccaaacgggaactcctacttgtgtatctatggctggtctaccaacccattggtcgagttctacatcgttgagtcctgggggaactggagaccgcctggtgcctgcctgaccgctgatacttacgtttggacagatcgggggctggagacagtcgctgaggttttcgggcgggcggggctccctctctcatccactagcagggttaccgacgtgagggaccgggatatccgggtggtcaacgagaagggcgagctggagcaggtggctgctctcacgcataatgggaggcagccagttgtgaggatcacagtcgcttccggcaggcaggtcacggttacacggaaccaccctctgcgcgtcatgaatgacgatggcttcattgtttggagggaggctgggcagctgagggagggcgacgtgctcgtctccgctgccttcggcgctgtccaggctgcttcgggcgggggcctctctgaggacgaggctgttctcctggggtacctgaccgctgctggcagcctcgatccagctgggcatgtgtgcttcaccacgacagacatcgagacaggcgctgagttcgctgctctggctgagtggctcctggacactaccgtcactgctgttccaggggatggccaggtggcctacgtgctgtccgacccagctgctaggcacacgctcgctgagcgctacggcgtggattacgctgctgctgctcggatcccgcagtgcgtccgcactgctggcgacaagatgcagagggctttcctcgctgctctgtacaccgctgctggctggactgacaccagcgctgccgttgggctgaggacggcttcggctccactcgcgagggaggtgcagtacctcctgtacgggctgggcatcccagccgacctcgataggtctcacgggaacggccagcatccttgggctgtgaccatttcaccagctgctgctccaaggttccacactgaggtcggcttccgcaccgctcagcagtcgccacagacggggctgcatgagccaacaccacaggtggaggctatcccaaatctcacgggcctgattcacgctctcagggactcaatcggggatcgggccgagtccacagacgatccattccctgctgctagcgggggcgcttacgacagggatcaggttcgccgcgtgatcgactgggctaagaggaggactgatgaggctccagctaccgctaacgctatcctcggctacctgacgcagctcacagatgccaggtacacgtacgagccaattacagccgtcgaggacgcgggccagcagcctaccttcgacctcatggttccaaggactcatagcttcctcgccaatggcattctctcacacaacacgtccctgggccaagtgacaatcgatggcgggacctacgacatctataggacgacacgcgtcaaccagccttccattgtggggacagccacgttcgatcagtactggagcgtgcgcacctctaagcggacttcaggaacagtgaccgtgaccgatcacttccgcgcctgggcgaaccggggcctgaacctcggcacaatagaccaaattacattgtgcgtggagggttaccaaagctctggatcagccaacatcacccagaacaccttctctcagggctcttcttccggcagttcgggtggctcatccggctccacaacgactactcgcatcgagtgtgagaacatgtccttgtccggaccctacgttagcaggatcaccaatccctttaatggtattgcgctgtacgccaacggagacacagcccgcgctaccgttaacttccccgcaagtcgcaactacaatttccgcctgcggggttgcggcaacaacaataatcttgcccgtgtggacctgaggatcgacggacggaccgtcgggaccttttattaccagggcacatacccctgggaggccccaattgacaatgtttatgtcagtgcggggagtcatacagtcgaaatcactgttactgcggataacggcacatgggacgtgtatgccgactacctggtgatacagtga

SEQ ID NO: 2982 - DNA, 2085 bp, Artificial Sequence
  Synthetic Construct, AT-139 intein modified protein encoding nucleic acids
atgcaaacaagcattactctgacatccaacgcatccggtacgtttgacggttactattacgaactctggaaggatactggcaatacaacaatgacggtctacactcaaggtcgcttttcctgccagtggtcgaacatcaataacgcgttgtttaggaccgggaagaaatacaaccagaattggcagtctcttggcacaatccggatcacgtactctgcgacttacaacccaaacgggaactcctacttgtgtatctatggctggtctaccaacccattggtcgagttctacatcgttgagtcctgggggaactggagaccgcctggtgcctgcatgcactacgacacactcgtgacactcgctgacggcacacaggagaagatcgggacaatcgtggaccgcaagctggacgtggaggtcctgtcgtacgatccagagaccgacaggatcgtgccaaggagggtggtcaactggttcgataatggcgccgcggaccacttcctgcagttcactgtgggcaggtctgggaagccaggcggggctcagttcaccgctacgccaaaccatctcatcaggacccctggcgggtggagggaggctggcgagctcattgctggggacagggttctggtgcacgagccacattacctcaatgagcagcagaggcaggttgtgtacggctcgctcatgggcagggggacgctggtcccagataggcacggcgggcctggcgttcacttctgcatggctcatacagccgagcaggctgcctacctggactggaaggtctccctcctgggcaacattgcccactcacgcaccgctgaggcttccgctacggtcggggttgagttcacaccgatgcccgagctcagcgagctgcatagggtcgttgatttcggcgacgggcacacccatctcacgtgggagttcctcaagcagctgacgccactcgcgctggctgtgtggtacctcgatgcgggcacactgactatccctcagtccgggactgacgatgacgccagggtgcagattgacgtcgagaccctgtcgccaggctctcggcagaggctcgtcgagtacctgagggatacccacgagctcgacgctgctgtggtccagcagggcgctgacgcgaggtctctcctggagttcacaccagctgctaccgtgcgcttcctggagctggttgcgccatacgtgcctgagtcaatgtccagcatgctcctggctcagttcaggggcaggtgcagcgtcacgccagagtactcggatccagtccagaggctcgttgctgctccagtgctggacatccaggtgaagcccggcagcacacgcaagttcgacattgaggttgagggcaatcataactacttcgtggatggggtcatggttcataatacgtccctgggccaagtgacaatcgatggcgggacctacgacatctataggacgacacgcgtcaaccagccttccattgtggggacagccacgttcgatcagtactggagcgtgcgcacctctaagcggacttcaggaacagtgaccgtgaccgatcacttccgcgcctgggcgaaccggggcctgaacctcggcacaatagaccaaattacattgtgcgtggagggttaccaaagctctggatcagccaacatcacccagaacaccttctctcagggctcttcttccggcagttcgggtggctcatccggctccacaacgactactcgcatcgagtgtgagaacatgtccttgtccggaccctacgttagcaggatcaccaatccctttaatggtattgcgctgtacgccaacggagacacagcccgcgctaccgttaacttccccgcaagtcgcaactacaatttccgcctgcggggttgcggcaacaacaataatcttgcccgtgtggacctgaggatcgacggacggaccgtcgggaccttttattaccagggcacatacccctgggaggccccaattgacaatgtttatgtcagtgcggggagtcatacagtcgaaatcactgttactgcggataacggcacatgggacgtgtatgccgactacctggtgatacagtga

SEQ ID NO: 2983 - DNA, 2625 bp, Artificial Sequence
  Synthetic Construct, AT-140 intein modified protein encoding nucleic acids
atgcaaacaagcattactctgacatccaacgcatccggtacgtttgacggttactattacgaactctggaaggatactggcaatacaacaatgacggtctacactcaaggtcgcttttcctgccagtggtcgaacatcaataacgcgttgtttaggaccgggaagaaatacaaccagaattggcagtctcttggcacaatccggatcacgtactctgcgacttacaacccaaacgggaactcctacttgtgtatctatggctggtctaccaacccattggtcgagttctacatcgttgagtcctgggggaactggagaccgcctggtgcctcgctgctgcctgaggagtggattccgctcgtggagaatggcaaggttcggctgcatcgcatcggggagttcgtggacaagctcatggagaccgacagcgagctcgtcaagcgcaacggcgataccgaggtcctggaggtgcgcgggatcagggctctgtctttcgaccggaagtcaaagaaggcgcgcgtgatgccggtcaaggctgttattcggcaccgctactccggcgatgtgtacgagatcgtcctcggcagcgggaggaggattaccgtcacggaggggcattcgctcttcgcttacggcgacggggagctgagggaggtgacaggcggggagatcaaggctggcgatctcctggctgttccaaggagggtgaacctgcccgagaagaaggagcgcctgaatctcgtcgagctcctgaggaggctcccagaggaggagacaggcgacatcattctgactatccccgtgaagggcaggaagaacttcttcaaggggatgctgcggacactccgctggatttccggcgaggagaagaggccaaggactgctaggaggtacctggagcacctggagggcctgggctacgtgcgcctcaagaagatcggctacgaggttaccgacagggaggggctggagaggtacaggaagctctacgagaggctggtggaggcggtccggtacaacggcaataagcgcgagtacctcgtggagttcaacgctgttcgcgacgtgatcgccctgatgccggaggaggagctcagggattggctggtcggcaccaggaatgggttccggatgaggcccttcgtggagatcgaggaggacttcgctaagctcctgggctactacgtctcggaggggaacgccaggaagtggcggaaccagaagaatggctggtcttacacggtgaagctctacaacgagaatcagcgcgtcctcgacgatatggagtccctggcggagaggttcttcggccgcgtgaagagggggaagaactacatcgagattccaaggaagatggcttacatcattttcgagaacctctgcggcaccctggccgagaataagcgggttccagaggcgatcttcacgtcgcctgagtctgtgcgctgggccttcatcgagggctacttcattggcgacggggatgttcatccttctaagagggtgcggctgtcaacgaagtccgagctcctggtcaacggcctcgttctcctgctcaatagcctgggggtctcggccatcaagattcgccacgactcaggcgtttacagggtttacgtgaacgaggagctcccattcacagattaccgcaagaagaagaacgcgtactactcccatgtcatccctaaggagattctggaggagactttcggcaaggtgttccagcggtccgtcagctacgagaagttccgcgagctcgtgaagtccgagaagctggacggcgagaaggccaagaggatcgagtggctgctcaacggggacgtggtcctcgataaggtcctggaggttaagaagcggccatacgagggctacgtgtacgatctctctgtggaggaggatgagaacttcctcgctggcttcgggctgctctacgctcacaatacgtccctgggccaagtgacaatcgatggcgggacctacgacatctataggacgacacgcgtcaaccagccttccattgtggggacagccacgttcgatcagtactggagcgtgcgcacctctaagcggacttcaggaacagtgaccgtgaccgatcacttccgcgcctgggcgaaccggggcctgaacctcggcacaatagaccaaattacattgtgcgtggagggttaccaaagctctggatcagccaacatcacccagaacaccttctctcagggctcttcttccggcagttcgggtggctcatccggctccacaacgactactcgcatcgagtgtgagaacatgtccttgtccggaccctacgttagcaggatcaccaatccctttaatggtattgcgctgtacgccaacggagacacagcccgcgctaccgttaacttccccgcaagtcgcaactacaatttccgcctgcggggttgcggcaacaacaataatcttgcccgtgtggacctgaggatcgacggacggaccgtcgggaccttttattaccagggcacatacccctgggaggccccaattgacaatgtttatgtcagtgcggggagtcatacagtcgaaatcactgttactgcggataacggcacatgggacgtgtatgccgactacctggtgatacagtga

SEQ ID NO: 2984 - DNA, 2019 bp, Artificial Sequence
  Synthetic Construct, AT-141 intein modified protein encoding nucleic acids
atgcaaacaagcattactctgacatccaacgcatccggtacgtttgacggttactattacgaactctggaaggatactggcaatacaacaatgacggtctacactcaaggtcgcttttcctgccagtggtcgaacatcaataacgcgttgtttaggaccgggaagaaatacaaccagaattggcagtctcttggcacaatccggatcacgtactctgcgacttacaacccaaacgggaactcctacttgtgtatctatggctggtctaccaacccattggtcgagttctacatcgttgagtcctgggggaactggagaccgcctggtgcctcctaccatcatgatttcgagctgctgctggctgacgggcgcaaggttaagatcggggagctggtggacaagctgattgagaagaatcgggaccgcgtcatcctgggcaaggataccgagatcctcccggttgaggacattgagctcctggcctacgatctggagaagagggagatcgttaaggtgaaggctgaccgcgtctcaaggcacaaggctccagagcgcttcatcaagctcaggttctccaatggccgggagattaccgtgacgccggagcatcccgtcatggtttgggagaacggggagatcacagagaagccagcggagaagatcactcctggcgatattgctctcggggttctgcgctacccgattcaggtggacggcaagttcaaggagaggtaccgggatatgagggaggcggaggactaccaggattacctgtactcccggggcgtggtcagcaagatcaagcgcaccgggatctacttcacggtggagaaggctaggagggctctcccgcgggagctggtcaagcccctcatcaacgctggcaagattctcagggttacacagactccaaaggagcgggcgagcttcaatcagaagctggtccgcgagaacatcattgaggggtacctccagaggatcattgagcggatggacgagctggagaggctgtcgcgcgaggatccagctaaggctctggagctcctgcctaagacccagctctactacaagtacggcatcacgtacgggaagctcaagaagctggctgaggctcgcaactcctgggctgagggcatcattcagtcggcggtggctgagcgcatctctctggccaagagggagctggaggagttcttcaagtggtggaacgcgaatgtcaacttcctgaaggtgaagtgcgtcgaggagatcaagaacgaccgctgggagtgggtgtacgacgttactgtggagcctcatcatctcttcgtttcgcatgggctcgttctgcataatacgtccctgggccaagtgacaatcgatggcgggacctacgacatctataggacgacacgcgtcaaccagccttccattgtggggacagccacgttcgatcagtactggagcgtgcgcacctctaagcggacttcaggaacagtgaccgtgaccgatcacttccgcgcctgggcgaaccggggcctgaacctcggcacaatagaccaaattacattgtgcgtggagggttaccaaagctctggatcagccaacatcacccagaacaccttctctcagggctcttcttccggcagttcgggtggctcatccggctccacaacgactactcgcatcgagtgtgagaacatgtccttgtccggaccctacgttagcaggatcaccaatccctttaatggtattgcgctgtacgccaacggagacacagcccgcgctaccgttaacttccccgcaagtcgcaactacaatttccgcctgcggggttgcggcaacaacaataatcttgcccgtgtggacctgaggatcgacggacggaccgtcgggaccttttattaccagggcacatacccctgggaggccccaattgacaatgtttatgtcagtgcggggagtcatacagtcgaaatcactgttactgcggataacggcacatgggacgtgtatgccgactacctggtgatacagtga

SEQ ID NO: 2985 - DNA, 2223 bp, Artificial Sequence
  Synthetic Construct, AT-142 intein modified protein encoding nucleic acids
atgcaaacaagcattactctgacatccaacgcatccggtacgtttgacggttactattacgaactctggaaggatactggcaatacaacaatgacggtctacactcaaggtcgcttttcctgccagtggtcgaacatcaataacgcgttgtttaggaccgggaagaaatacaaccagaattggcagtctcttggcacaatccggatcacgtactctgcgacttacaacccaaacgggaactcctacttgtgtatctatggctggtctaccaacccattggtcgagttctacatcgttgagtcctgggggaactggagaccgcctggtgcctgcatgcatcctgacacatacgtggttactaagtcgggggctaagaaggtctctgagctgactgagggggatgaggtcctgacacataccggcacgttcaagaaggtcatccagccactgaggagggagcacaaggggcgcctcctggttatcaaggcctacggcaccgtgcctgtcaagattacgccggagcacatggtttgggtggtcaagcagatcaggcacaagtcccattacagcgatgggcggcaggtcatttggtgggagttcgagggcccagagtggatgacggctcaggagctgaaggagcgcctggagtccgagacagacccaaaggtgagctacatgctcctgcagccaatccctgagccgtccgtggacgcggataagattcctctgaggaaggaggtctacgttgtgaaccagcacggcaagacagacaagctccatccgtccgtgaagcggactcccgagtacctgccactcaacttcgagaccgctaggctgatcggcctctggattgctgaggggtcaacttccaagaacggcgtcatcaagttcgacatttccagcaatgaggaggatctgacggagttcatcacaggcactattaggaagtacttcccgcacgctaagatcgtcgttaaggaccatgagaggaacaggaggacggtccggttctgcaataagcgcttcgcggagtggctcagggagaacatcggccacggggctgataataagagcattccgcccctcctgctcctgaacaagaatagggaggtgcgcctgggcctcctgagggggctcatcgagggcgacggctacgtgcgcagggagtcgcagcgcagggcgaactacatcagctactcgacagtttctccctcactggcttaccagctccagctcctggtggcttcgctgggctacacctcgtctatccacaggtctattcggacagagggcatcgggaagactaggaagcccatctacgatgttaaggtgtcgggcaagtcttactactcactcctggaggagctcgggttcgaggtcccacagaggggcaacaggacctacaacgttaatcgcacgtggaagaattacctcctgctcaaggtgaggtccatcgaggaggaggagtacgagggcgacgtttacaatctggaggttgagggggatgagtcaggctctgtgggcttcatcgtgcataatacgtccctgggccaagtgacaatcgatggcgggacctacgacatctataggacgacacgcgtcaaccagccttccattgtggggacagccacgttcgatcagtactggagcgtgcgcacctctaagcggacttcaggaacagtgaccgtgaccgatcacttccgcgcctgggcgaaccggggcctgaacctcggcacaatagaccaaattacattgtgcgtggagggttaccaaagctctggatcagccaacatcacccagaacaccttctctcagggctcttcttccggcagttcgggtggctcatccggctccacaacgactactcgcatcgagtgtgagaacatgtccttgtccggaccctacgttagcaggatcaccaatccctttaatggtattgcgctgtacgccaacggagacacagcccgcgctaccgttaacttccccgcaagtcgcaactacaatttccgcctgcggggttgcggcaacaacaataatcttgcccgtgtggacctgaggatcgacggacggaccgtcgggaccttttattaccagggcacatacccctgggaggccccaattgacaatgtttatgtcagtgcggggagtcatacagtcgaaatcactgttactgcggataacggcacatgggacgtgtatgccgactacctggtgatacagtga

SEQ ID NO: 2986 - DNA, 2652 bp, Artificial Sequence
  Synthetic Construct, AT-143 intein modified protein encoding nucleic acids
atgcaaacaagcattactctgacatccaacgcatccggtacgtttgacggttactattacgaactctggaaggatactggcaatacaacaatgacggtctacactcaaggtcgcttttcctgccagtggtcgaacatcaataacgcgttgtttaggaccgggaagaaatacaaccagaattggcagtctcttggcacaatccggatcacgtactctgcgacttacaacccaaacgggaactcctacttgtgtatctatggctggtctaccaacccattggtcgagttctacatcgttgagtcctgggggaactggagaccgcctggtgcctgcctgctgccggatgagaaggttattctccctgagcatgggcctattacactcaaggggctcttcgatctcgctaaggagacagtcgtggctgacaacgagaaggagatccgcaagctgggcgccaagctcaccattgtgggcgaggatgggaggctcagggtcctggagagcccatacgtttggaaggtgcggcaccgcggcaagatgctgagggtcaagctcaagaactggcactcagtgtccgtcacgccagagcatcccttcctgaccacgcggggctgggtgcgcgctgaccagctcaagccgggggattacgttgcggtgcccagggtcatccatggcaacgagtcagacgagcggttcgtctccttcgtttacgagaagctcaagaatgatgagctgatcgcgaagctccgcggcgaggtgctgtccaagatttccagcgagttcaagggggacagggcttacaaggttgagaggaacgtgttccggtgggaggacatcgagcgcctcaatctgtgggatgaggtggagagggtcgccttcaccccaaggatgcacaggagcggcaagccactgcattacgtgaagctcccaaggtcgcctgaggagtgggaggctttcttctacttcgctggcgtcatgttcggcgacgggtcccaggataagatcgccaacaatgacgtcgaggtttacgaggagctcaagaagctgtctgttctcggcgtggctgtcaagagggtggagaggacaacttcatacgagatcgagctcaccaacgggaagaatgctctcctgaggctcctgagggtgctgttcgagtacccggagcggcagaaggcgaagtccattagggttccacggatcctgttcattgctcctcgcaagtatgtgtcccgcttcctcaggggctacttcgacgcggatgggcacgtcagcctgaaggacgcgaggatcgaggttacgagcgcttcgcaggagttcctggaggatctcagcctcctgctcctgcggttcggcatcgtgtccaagatctaccgcagcgactacaccacgctcgttatctcgggccgcaggaacctcgatctgttccggcgctacattgggttctctgtcaagaataaggccgaggcgctggagaaggccatcaagaagtcaaggcggtctgagtcataccccattttcgaggagctgaagaggctccggctcctgttcggcttcacacgcactgagctcaacagcaatgtgccattctacgggaagtacgagtcggaggaggccccttcttacgagacactgatgaggatcctcgacgcgattgagaagggctcgatcaacctggataagaagattgctgtcctggaggggcgcatcagggaccataattacattaaggccttcgagaaggacggcctgatcaaggatgggaagctgactgagctcggcagggagctcctggaggtctggaggaacagggagttcgactcgtctgacgtcgattacatccggaacctggcggagaatctcgtcttcatcccggttgaggacattgaggagttcgagtacgagggctacgtttacgacgttactacagagactcataatttcgttgctaatggcatcctcgttcataatacgtccctgggccaagtgacaatcgatggcgggacctacgacatctataggacgacacgcgtcaaccagccttccattgtggggacagccacgttcgatcagtactggagcgtgcgcacctctaagcggacttcaggaacagtgaccgtgaccgatcacttccgcgcctgggcgaaccggggcctgaacctcggcacaatagaccaaattacattgtgcgtggagggttaccaaagctctggatcagccaacatcacccagaacaccttctctcagggctcttcttccggcagttcgggtggctcatccggctccacaacgactactcgcatcgagtgtgagaacatgtccttgtccggaccctacgttagcaggatcaccaatccctttaatggtattgcgctgtacgccaacggagacacagcccgcgctaccgttaacttccccgcaagtcgcaactacaatttccgcctgcggggttgcggcaacaacaataatcttgcccgtgtggacctgaggatcgacggacggaccgtcgggaccttttattaccagggcacatacccctgggaggccccaattgacaatgtttatgtcagtgcggggagtcatacagtcgaaatcactgttactgcggataacggcacatgggacgtgtatgccgactacctggtgatacagtga

SEQ ID NO: 2987 - DNA, 2589 bp, Artificial Sequence
  Synthetic Construct, AT-144 intein modified protein encoding nucleic acids
atgcaaacaagcattactctgacatccaacgcatccggtacgtttgacggttactattacgaactctggaaggatactggcaatacaacaatgacggtctacactcaaggtcgcttttcctgccagtggtcgaacatcaataacgcgttgtttaggaccgggaagaaatacaaccagaattggcagtctcttggcacaatccggatcacgtactctgcgacttacaacccaaacgggaactcctacttgtgtatctatggctggtctaccaacccattggtcgagttctacatcgttgagtcctgggggaactggagaccgcctggtgcctgcgtttcgggggactcaaagatcctgacagggaaggggccagtggagatcgggcggctgaactctaacatgatcgcgggcatttggcgcttccagaccgagctggtgcggttcgaggagccacaccgcgttgagtaccgcagggagggcgtgaagatccgcacgaggctcgggttcgagattaaggccaccaaggagcataagttcctcacggtggacgagaacggcgagctgcgctgggtcgaggcttggaagctcaaggagggcaactgggtcggggtggtccggcgcctgccatctcctaatgtgaaggtctcaatcctcgacctcctgccgcccaacgcctacctcaagctgaagggcgagttcctgagggagctcaagctgtcgatccaggcgaagttcggctctattaggacatacgccaagaagaagcgctggtcagagtcctacctcgtcaagcagctgaatggcgtttacccgttcaggtgggagaggctctccgctgtgctgaaggacctcgatctgcgcatgacagagaacgacgtcgagaggatcacttccgataagggcaagtacagcctcccgatcgagttcaccccctcaatggctaggctcctgggcttctggatggctgacgggtcctggaagggcgggaccctcacgctgttctccagcgataggaagatgctggagaagtacaaggagctgtgcaaggaggagttcggcgttgtggggcggatccgcatgctcaacgagtctacatactcactggagatctctttcaatctcctgccggctattttcaagaacctgacaggcaatactgagcgcaagagcaagctcgggactttcccatccatcatctacagcctgcctgaggagcacaagagggagttcctcgcgggctacttcgacggcgatgggttcctggaggttaagggcgggagggtgtactcggctggcttctctaccttcaacaagaggttcgcggagggcatccgggacattctcctgcagctcgggatcgtgtcgtctattagggcccgggagtacgatgaggtccagaagttcaagggccgcgttatccccaagaagggggcttcatacacggtttccgtgctcggcggggagtacctgaagaggttcttcgacgccgtccgcccatggaggtcggattacgagggctgggaggggatgtacaacgagggctacagcaattcggacgtcgttcccaacctcggcaagcgcctgaggagcatcagggagaggctgggcattagcgcttaccgcatgtcgaagatggggttctacaatccagtccgcgttgagctgggcgagagggagatctccaggcggaacctcaggctcctggtggagttctacgagcgggtcgcgaaggagaagcgcgtggaggacgtcctggaggagctgagctacctcagggagctggctgagggcgacgtgttcttcgatcgcatcacgtcggtggagcctgcctacattgatgtcgcgtacggcatcatcaactcggagacagagaactacatcgtggagggcttcatttccaagaacacgtccctgggccaagtgacaatcgatggcgggacctacgacatctataggacgacacgcgtcaaccagccttccattgtggggacagccacgttcgatcagtactggagcgtgcgcacctctaagcggacttcaggaacagtgaccgtgaccgatcacttccgcgcctgggcgaaccggggcctgaacctcggcacaatagaccaaattacattgtgcgtggagggttaccaaagctctggatcagccaacatcacccagaacaccttctctcagggctcttcttccggcagttcgggtggctcatccggctccacaacgactactcgcatcgagtgtgagaacatgtccttgtccggaccctacgttagcaggatcaccaatccctttaatggtattgcgctgtacgccaacggagacacagcccgcgctaccgttaacttccccgcaagtcgcaactacaatttccgcctgcggggttgcggcaacaacaataatcttgcccgtgtggacctgaggatcgacggacggaccgtcgggaccttttattaccagggcacatacccctgggaggccccaattgacaatgtttatgtcagtgcggggagtcatacagtcgaaatcactgttactgcggataacggcacatgggacgtgtatgccgactacctggtgatacagtga

SEQ ID NO: 2988 - DNA, 2622 bp, Artificial Sequence
  Synthetic Construct, AT-145 intein modified protein encoding nucleic acids
atgcaaacaagcattactctgacatccaacgcatccggtacgtttgacggttactattacgaactctggaaggatactggcaatacaacaatgacggtctacactcaaggtcgcttttcctgccagtggtcgaacatcaataacgcgttgtttaggaccgggaagaaatacaaccagaattggcagtctcttggcacaatccggatcacgtactctgcgacttacaacccaaacgggaactcctacttgtgtatctatggctggtctaccaacccattggtcgagttctacatcgttgagtcctgggggaactggagaccgcctggtgcctctattctgcctgaggagtggctgcctgttctggaggagggggaggttcatttcgttaggatcggggagctgattgaccgcatgatggaggagaacgctggcaaggtcaagagggagggggagaccgaggtcctggaggtttcaggcctggaggtgccgtccttcaaccgcaggacgaataaggcggagctgaagagggtcaaggctctcatccggcacgactactctggcaaggtgtacaccattaggctgaagtcaggccggcgcatcaagattacgtcagggcattccctgttcagcgtccggaacggcgagctcgttgaggtgaccggcgacgagctgaagccaggggatctcgtcgctgttccaaggaggctggagctgccagagaggaaccacgtcctcaatctggttgagctcctgctcggcacaccggaggaggagactctggacatcgtgatgacgattcccgtcaagggcaagaagaacttcttcaaggggatgctcaggacactgcggtggatcttcggcgaggagaagaggccaaggactgctcgcaggtacctcaggcatctggaggacctcggctacgtgcggctcaagaagatcgggtacgaggtcctggactgggatagcctcaagaattaccggcgcctgtacgaggctctcgtggagaacgtccgctacaacggcaataagagggagtacctggttgagttcaattcgatccgcgacgccgtggggattatgccgctgaaggagctcaaggagtggaagatcggcacactcaacgggttccggatgcgcaagctgattgaggtcgatgagtccctcgccaagctgctcggctactacgtgagcgaggggtacgcgcgcaagcagaggaacccgaagaatggctggtcgtactctgtcaagctgtacaatgaggaccccgaggttctggacgatatggagcggctcgcgagccgcttcttcggcaaggttaggcgggggaggaactacgtggagatccccaagaagattggctacctgctcttcgagaatatgtgcggggtgctcgctgagaacaagcgcatcccagagttcgtcttcacatcacctaagggcgttaggctggccttcctggaggggtactccagcgctatggctacctccacggagcaggagactcaggcgctgaacgagaagcgcgctctggccaatcagctcgttctgctcctgaactcggtgggcgtctctgctgtgaagctcggccacgactccggggtttacagggtgtacatcaatgaggagctgccattcgtcaagctcgataagaagaagaacgcttactacagccatgtgattcctaaggaggtcctctcggaggtcttcggcaaggttttccagaagaacgtgtccccacagaccttccggaagatggtcgaggacggcaggctggatcctgagaaggctcagaggctgtcgtggctcatcgagggggacgtggtcctcgatcgcgtcgagtctgttgacgtggaggactacgatggctacgtgtacgatctctctgtggaggataatgagaacttcctcgtgggcttcgggctcgtttacgctcataatacgtccctgggccaagtgacaatcgatggcgggacctacgacatctataggacgacacgcgtcaaccagccttccattgtggggacagccacgttcgatcagtactggagcgtgcgcacctctaagcggacttcaggaacagtgaccgtgaccgatcacttccgcgcctgggcgaaccggggcctgaacctcggcacaatagaccaaattacattgtgcgtggagggttaccaaagctctggatcagccaacatcacccagaacaccttctctcagggctcttcttccggcagttcgggtggctcatccggctccacaacgactactcgcatcgagtgtgagaacatgtccttgtccggaccctacgttagcaggatcaccaatccctttaatggtattgcgctgtacgccaacggagacacagcccgcgctaccgttaacttccccgcaagtcgcaactacaatttccgcctgcggggttgcggcaacaacaataatcttgcccgtgtggacctgaggatcgacggacggaccgtcgggaccttttattaccagggcacatacccctgggaggccccaattgacaatgtttatgtcagtgcggggagtcatacagtcgaaatcactgttactgcggataacggcacatgggacgtgtatgccgactacctggtgatacagtga

SEQ ID NO: 2989 - DNA, 2460 bp, Artificial Sequence
  Synthetic Construct, AT-146 intein modified protein encoding nucleic acids
atgcaaacaagcattactctgacatccaacgcatccggtacgtttgacggttactattacgaactctggaaggatactggcaatacaacaatgacggtctacactcaaggtcgcttttcctgccagtggtcgaacatcaataacgcgttgtttaggaccgggaagaaatacaaccagaattggcagtctcttggcacaatccggatcacgtactctgcgacttacaacccaaacgggaactcctacttgtgtatctatggctggtctaccaacccattggtcgagttctacatcgttgagtcctgggggaactggagaccgcctggtgcctgcttcgctaaggacactaaggtctactacgagaatgacacactggttcatttcgagtcaattgaggacatgtaccataagtacgcttctctcgggagggaggtgccattcgacaacggctacgctgtcccactggagaccgtgtcagtctacacgttcgatccgaagacaggcgaggttaagaggacgaaggctagctacatctaccgggagaaggtggagaagctcgccgagatccgcctgtcgaacggctacctcctgaggattacactcctgcaccccgttctcgtgttccggaatggcctgcagtgggtgccagctggcatgatcaagcctggggacctcatcgtcggcattcgctcggttccagcgaacgccgcgactattgaggagtctgaggcctacttcctcgggctgttcgtggctgagggcacctcaaatcctctctccatcaccacgggctccgaggagctgaaggacttcatcgtcagcttcattgaggaccatgatgggtacacaccaactgtcgaggttcgcaggggcctctaccggatcctgttccgcaagaagacggctgagtggctcggcgagctggctacttcgaacgcctctaccaaggtggtccctgagagggtcctcaatgcgggggagtccgctatcgctgccttcctcgctggctacctggacggcgatgggtacctcactgagtctattgtggagctggtcaccaagtcacgggagctcgctgacgggctggtgttcctcctgaagcgcctgggcatcacgccgaggattagccagaagacaatcgaggggtcggtctactaccggatctacattacgggcgaggatcgcaagacattcgagaaggtcctggagaagtccaggatcaagccaggggagatgaacgagggcggggttggcaggtacccaccagctctgggcaagttcctcgggaagctgtacagcgagttcaggctccccaagcgggacaacgagactgcgtaccacatcctgaccaggtcacggaatgtgtggttcaccgagaagacgctctcccggattgaggagtacttcagggaggctctggagaagctgtcggaggctaggaaggctctggagatgggcgacaagccggagctgccattcccttggacagcgatcactaagtacgggttcacggatcgccaggtcgctaactacaggacaaggggcctcccaaagaggccagagctgaaggagaaggttgtgtccgccctcctgaaggagatcgagaggctggagggcgtggctaagctcgctctggagaccattgagctcgctaggcgcctggagttccatgaggtttccagcgtggaggtcgttgactacaatgattgggtctacgatctcgtcattccagagactcataacttcattgctccaaatgggctcgtgctccacaacacgtccctgggccaagtgacaatcgatggcgggacctacgacatctataggacgacacgcgtcaaccagccttccattgtggggacagccacgttcgatcagtactggagcgtgcgcacctctaagcggacttcaggaacagtgaccgtgaccgatcacttccgcgcctgggcgaaccggggcctgaacctcggcacaatagaccaaattacattgtgcgtggagggttaccaaagctctggatcagccaacatcacccagaacaccttctctcagggctcttcttccggcagttcgggtggctcatccggctccacaacgactactcgcatcgagtgtgagaacatgtccttgtccggaccctacgttagcaggatcaccaatccctttaatggtattgcgctgtacgccaacggagacacagcccgcgctaccgttaacttccccgcaagtcgcaactacaatttccgcctgcggggttgcggcaacaacaataatcttgcccgtgtggacctgaggatcgacggacggaccgtcgggaccttttattaccagggcacatacccctgggaggccccaattgacaatgtttatgtcagtgcggggagtcatacagtcgaaatcactgttactgcggataacggcacatgggacgtgtatgccgactacctggtgatacagtga

SEQ ID NO: 2990 - DNA, 2481 bp, Artificial Sequence
  Synthetic Construct, AT-147 intein modified protein encoding nucleic acids
atgcaaacaagcattactctgacatccaacgcatccggtacgtttgacggttactattacgaactctggaaggatactggcaatacaacaatgacggtctacactcaaggtcgcttttcctgccagtggtcgaacatcaataacgcgttgtttaggaccgggaagaaatacaaccagaattggcagtctcttggcacaatccggatcacgtactctgcgacttacaacccaaacgggaactcctacttgtgtatctatggctggtctaccaacccattggtcgagttctacatcgttgagtcctgggggaactggagaccgcctggtgcctgcgttacccctgacacactcgtttcgctcgctgacgggcggattatggagatcaaggatgcggtggagaagtcggagggcaatctgctcagcgtgaacggcctgaagccgaaggaggccaaggcgctcaagttctgggagatcgactggaacgggcccctcaaggtcatcaagctgaagaatggccacgagattaaggccacgccagaccatgggctcctggtcatgagggagggcaagctggggtgggtttcggcgaagaacgtgagggagggcgactacgtcgctttcgcttacaataccggccacagggggagggatgagtacacgctcctgaagctcatgatcaagctgggcattaccgacgtgatggtcgagctcgatgaggagtacttcaacgagaaggttgcccctatcgtgagggagcggatttccacaagcactaagtacaagtacctgaggaggagggtcctcccactgtacctcctgcaggagtggggcctggacgattacgaggcccatgttaagtccctctacaggcagagggctggcagcaagccaatccccaatttcaagctcgacggcaggttctggtatgtgttcgggctcgttctgggcgacgggacactccgcgatagcaaggtgctgatctcgcagactccactcaaggacgtcaagtccgttctggaggatgtcttccctttcctcagggttttcgagaccacgaaccaggttggcttctccaactccatcatcgctgaggtgttccgcaggctcggcgctaggaaggggaagctccacccactggtcttcggcctgagggaggagtacatcaacgcgatgattgctggctacttcgacaccgatgggacgttctctatcctcaacgacaggaagggcccaaatttccgggggatcctgacatcaaagcggggcgatgtgctccgcatgctgtccgtctacctgtaccagatcggcattatgaactacctcaggagggacgagaggaccggggtgtgggatctgatcatttcaaatcgctccctggagaagttcagggagaagatctacccgtacctccggattaggcgggctcagttcgacgaggcctactctgtctacagggcctcacgcagggctttcgagggcgatctcctgccagtggcccctgtcttcggcaagctgaagttcaagaacgggacaaagaatcgcatcctcaaggagactggcattgacgtgtggaactggctgaagaggccagagggggagatcccccgcgataagctctccaaggtcctggagtacgctgaggagtcgcccgagaaggagttcctcaagtctctggtggaggcgggcgtcacctgggttaaggtgaagggggtggaggaggagctgtacacgggcaagctctacgacttcacaactactacggagaatttcctctcaaatggggctgtttctcataatacgtccctgggccaagtgacaatcgatggcgggacctacgacatctataggacgacacgcgtcaaccagccttccattgtggggacagccacgttcgatcagtactggagcgtgcgcacctctaagcggacttcaggaacagtgaccgtgaccgatcacttccgcgcctgggcgaaccggggcctgaacctcggcacaatagaccaaattacattgtgcgtggagggttaccaaagctctggatcagccaacatcacccagaacaccttctctcagggctcttcttccggcagttcgggtggctcatccggctccacaacgactactcgcatcgagtgtgagaacatgtccttgtccggaccctacgttagcaggatcaccaatccctttaatggtattgcgctgtacgccaacggagacacagcccgcgctaccgttaacttccccgcaagtcgcaactacaatttccgcctgcggggttgcggcaacaacaataatcttgcccgtgtggacctgaggatcgacggacggaccgtcgggaccttttattaccagggcacatacccctgggaggccccaattgacaatgtttatgtcagtgcggggagtcatacagtcgaaatcactgttactgcggataacggcacatgggacgtgtatgccgactacctggtgatacagtga

SEQ ID NO: 2991 - DNA, 2376 bp, Artificial Sequence
  Synthetic Construct, AT-148 intein modified protein encoding nucleic acids
atgcaaacaagcattactctgacatccaacgcatccggtacgtttgacggttactattacgaactctggaaggatactggcaatacaacaatgacggtctacactcaaggtcgcttttcctgccagtggtcgaacatcaataacgcgttgtttaggaccgggaagaaatacaaccagaattggcagtctcttggcacaatccggatcacgtactctgcgacttacaacccaaacgggaactcctacttgtgtatctatggctggtctaccaacccattggtcgagttctacatcgttgagtcctgggggaactggagaccgcctggtgcctgcatcgatggcaacgctaagattattttcgagaatgacggggaggagcatattatgacaatggcggagatgtacgagcgctacaaggatctgggcgagttctacgacccggagtacaaccggtgggggatcaatgtggaggaggttccggtctacgtgaagtcattcgatccctccaccaaggagattacgaagggcaaggtgaaggtcatctggaagtacgagctcggggaggacgttcccaagtacgagatcaagacaaacaagggcactagggtcctcacctcgccatggcaccctttcttcgtcattacgcaggatctgaagatcgttgagaagcgggctgatgagctcagggagggcgacatgctggtcggcgggatgccatctgacgatgactacgagttcctcctggactactggctcgccggcttcattgcgggcgatgggagcatcgacaagtaccgctcgcacgttaagggccatgagtatgtgtacgatcggctgcgcatctacgactacaccacggagacgctcggcatcattaacgaccacctggagaagacattcgggaagaggtactccctccagagggatcggaatatccactacatcgacattaaggccaagggcattactagccattacatcgagctcctgcgcggcatcaccaacgggattccgcagcccatcctgaaggagggcaggaatgctgtgctctctttcatcacgggcctgttcgatgccgaggggcatgtcaactcaaagccaggcgtggagctcgggatggtcaataggaagctgatcgaggacattacatactacctcaacagcctgggcatcaaggcgcgcatgaggaagaagcctcggaaggatggggtggactacgtcatgcacgttgaggagtactccagcctcctgcggttctacgagctcattggcaagaacctgcagaactccgagaagcgcatcaagctggaggagctcctgtctaagcataacggcgggtcattcggcctcaccctgtccttcgaggacttcaaggcgtggtcgtctaagtacggcgtggagttcaagacgaacgggtcccagacactcgctatcattaagaatgagaaggtgagcctgggccagtggcacaggagggggagggtctcgaaggctgtcctcgttaagatgctccggaagctgtacgatacaactaagtccgaggacgtgaagcgcatgctccatctgattgagggcctggaggtggtcaaggagatcaacgtcactaatgagccaaagaccttctacgacctgactgtggagcgctaccagaactacctcgccggggagaatggcatggttttcgtgcataatacgtccctgggccaagtgacaatcgatggcgggacctacgacatctataggacgacacgcgtcaaccagccttccattgtggggacagccacgttcgatcagtactggagcgtgcgcacctctaagcggacttcaggaacagtgaccgtgaccgatcacttccgcgcctgggcgaaccggggcctgaacctcggcacaatagaccaaattacattgtgcgtggagggttaccaaagctctggatcagccaacatcacccagaacaccttctctcagggctcttcttccggcagttcgggtggctcatccggctccacaacgactactcgcatcgagtgtgagaacatgtccttgtccggaccctacgttagcaggatcaccaatccctttaatggtattgcgctgtacgccaacggagacacagcccgcgctaccgttaacttccccgcaagtcgcaactacaatttccgcctgcggggttgcggcaacaacaataatcttgcccgtgtggacctgaggatcgacggacggaccgtcgggaccttttattaccagggcacatacccctgggaggccccaattgacaatgtttatgtcagtgcggggagtcatacagtcgaaatcactgttactgcggataacggcacatgggacgtgtatgccgactacctggtgatacagtga

SEQ ID NO: 2992 - DNA, 2547 bp, Artificial Sequence
  Synthetic Construct, AT-149 intein modified protein encoding nucleic acids
atgcaaacaagcattactctgacatccaacgcatccggtacgtttgacggttactattacgaactctggaaggatactggcaatacaacaatgacggtctacactcaaggtcgcttttcctgccagtggtcgaacatcaataacgcgttgtttaggaccgggaagaaatacaaccagaattggcagtctcttggcacaatccggatcacgtactctgcgacttacaacccaaacgggaactcctacttgtgtatctatggctggtctaccaacccattggtcgagttctacatcgttgagtcctgggggaactggagaccgcctggtgcctgcctgcatccggactcactcattcctacgcctcagggggttaagcgcatcaaggagctgccggagaagggggaggtcttcgctctcgacttcgatctcaagctgtcacgggcgaggtacaggctcctggagagggacgctgatgagcccatgtacaaggtgacactctccgacaggactgagctctacctgaccgcggatcacccggtcctcgtttacagggacgatcagctgatcttcgtccccgctgaggagctccgggagaacgaccaggtggtcctgttcattaatcgctcagagtactccccaaggaccgagtcgcctacgctcctgggcttcctcctggagaacgccacctctatgaaggactacatcctctacgatccagagttcggcggggtgctgaggaatcgcattaaggacgcgggcctcaagactgagatcctgtggaggttccggattcgcgagcccacctactacaagtacctccgcggcaagatgccggttcccatcgtgaggttcctcctggaggagggcgttgtgagcattgaggagctccgggaggtgttccgcgggttctcgtactctacatcactgactccaatcagcttcgagttctcggaggagttctggtacctcttcggcctggtcgctggcgacgggcacctggctaagaagggggctatcaccattccagccaaggaccgcaccgaggatacggtcaaggcggttaaggagatcgctaactccctccaggtgcctttcgccttcgacgagaagtacaagatgatcattctgcggtccaagagcctcacgaggctgttcgagctcctgggctgcccgtacgggaacaagacagagatcttcaggattccgggcgagatcatggcgaagccagagtggatggctgcgttcctcgctggctactacgacgcggatggccacatcgggacaaagccaactggcgggaagaagtcgcattctcctcagatcgtcctgacgagcaagaaccgcatggccatctacacagtcaagcagatgtggcagctcctgggcgttgggacgtacctctgggagaagaaggacaggaacggcaatttcatggcctacgagctgaaggtgtactcccgcgacgcgtggcggttctacgaggtcatgaagaaccacctccgcatcaagaggaaggacctggagcatgtgaaggaggtcgctattaggaagcggaaggcctactctcaccattactcagttctcaatgtgaagtcttgggagggcaagatcaagtccagcaacgttctgtggaagaagttcgacatgtccaatcagaccgctcacggcagggggatcagcctcgacaagctgcagcgcattgtcgattacctcaccgacacggatctgcgcaggatcgcgatgggcgatgtctacgtgctggggatcaggtccattgagaagttccattaccggggcaaggtgtacgatctcgtcgtggatcagtaccacaacttcattgctaatggggtcgtcgttcataatacgtccctgggccaagtgacaatcgatggcgggacctacgacatctataggacgacacgcgtcaaccagccttccattgtggggacagccacgttcgatcagtactggagcgtgcgcacctctaagcggacttcaggaacagtgaccgtgaccgatcacttccgcgcctgggcgaaccggggcctgaacctcggcacaatagaccaaattacattgtgcgtggagggttaccaaagctctggatcagccaacatcacccagaacaccttctctcagggctcttcttccggcagttcgggtggctcatccggctccacaacgactactcgcatcgagtgtgagaacatgtccttgtccggaccctacgttagcaggatcaccaatccctttaatggtattgcgctgtacgccaacggagacacagcccgcgctaccgttaacttccccgcaagtcgcaactacaatttccgcctgcggggttgcggcaacaacaataatcttgcccgtgtggacctgaggatcgacggacggaccgtcgggaccttttattaccagggcacatacccctgggaggccccaattgacaatgtttatgtcagtgcggggagtcatacagtcgaaatcactgttactgcggataacggcacatgggacgtgtatgccgactacctggtgatacagtga

SEQ ID NO: 2993 - DNA, 2283 bp, Artificial Sequence
  Synthetic Construct, AT-150 intein modified protein encoding nucleic acids
atgcaaacaagcattactctgacatccaacgcatccggtacgtttgacggttactattacgaactctggaaggatactggcaatacaacaatgacggtctacactcaaggtcgcttttcctgccagtggtcgaacatcaataacgcgttgtttaggaccgggaagaaatacaaccagaattggcagtctcttggcacaatccggatcacgtactctgcgacttacaacccaaacgggaactcctacttgtgtatctatggctggtctaccaacccattggtcgagttctacatcgttgagtcctgggggaactggagaccgcctggtgcctgcctgcctgcgcgggctagggtcgtggattggtgcacagggcgggtcgttcgggtcggggagatcgttaggggggaggctaagggcgtctgggtggtctccctggacgaggctaggctgaggctcgttccaaggcctgttgtggctgctttcccaagcggcaaggctcaggtgtacgctctgaggaccgctacgggcagggtgctggaggcgacagctaaccacccagtctacactccagagggctggaggccactggggaccctcgctcctggcgactacgtcgctctgccaaggcatctctcgtacaggccatctctgcacctggagggccatgagctggatctcctggggttcgctctggctgagggccacctccgccatccatcgggcgtgtacctctacacctccagcgaggaggagctggctgccatggaggaggctctcagggcgttccctaatacgcggatccgcgtcgtttggaggaggggggttgctcacgtctacgtgggcagggtggacaggaggcaggaggctggcgctgtggcgttcctcaggaggatgggcctcctggggctggatgcgaagacgaagaggctcccagaggctgtcttcggcctgccaccagaggaggttgctaggttcctggggaggctctggacaggcgacggcggggtggatccaaagggcaggctgattcactacgctactgctagcaaggagctcgcttggggcgtccagcatctcctgctcaggctgggcctccagagcaggctggtggagaagcggttctcgggcgggtacaagggctacgctgtctacctgctcggcgggctggaggctgctaggaggttcgctgagacagtggggccatacctggtcggcaagcggaggcaggacctggaggctctgctcgcttcatgggagaaggctggcaggtccaccggggatgttctgccactcgcgttcctggaggaggtgagggctgctgttgctgaggtggctcagggccaggtggctgacctgctcagggaggccggcctcgcggaggggctgctctgcctgggcagggggaggagggggctctctcgcgccaccgtcggcaggctggctgccctcacggggtcactggcgctgctccggctcgcggaggctgaggtttactgggatcgcgtcgaggcggttgagccgctcggcgaggaggaggtcttcgatctcactgtggagggcactcatactttcgttgcggaggatgttatcgttcataatacgtccctgggccaagtgacaatcgatggcgggacctacgacatctataggacgacacgcgtcaaccagccttccattgtggggacagccacgttcgatcagtactggagcgtgcgcacctctaagcggacttcaggaacagtgaccgtgaccgatcacttccgcgcctgggcgaaccggggcctgaacctcggcacaatagaccaaattacattgtgcgtggagggttaccaaagctctggatcagccaacatcacccagaacaccttctctcagggctcttcttccggcagttcgggtggctcatccggctccacaacgactactcgcatcgagtgtgagaacatgtccttgtccggaccctacgttagcaggatcaccaatccctttaatggtattgcgctgtacgccaacggagacacagcccgcgctaccgttaacttccccgcaagtcgcaactacaatttccgcctgcggggttgcggcaacaacaataatcttgcccgtgtggacctgaggatcgacggacggaccgtcgggaccttttattaccagggcacatacccctgggaggccccaattgacaatgtttatgtcagtgcggggagtcatacagtcgaaatcactgttactgcggataacggcacatgggacgtgtatgccgactacctggtgatacagtga

SEQ ID NO: 2994 - DNA, 2328 bp, Artificial Sequence
  Synthetic Construct, AT-151 intein modified protein encoding nucleic acids
atgcaaacaagcattactctgacatccaacgcatccggtacgtttgacggttactattacgaactctggaaggatactggcaatacaacaatgacggtctacactcaaggtcgcttttcctgccagtggtcgaacatcaataacgcgttgtttaggaccgggaagaaatacaaccagaattggcagtctcttggcacaatccggatcacgtactctgcgacttacaacccaaacgggaactcctacttgtgtatctatggctggtctaccaacccattggtcgagttctacatcgttgagtcctgggggaactggagaccgcctggtgcctgcctgcatccggacactctcgttcataccgatcgggggactctcaggctgcgggagctcgtggaccctttcaggcggggctggcagccgcacaccctgagcgttgctacggacgagggctggaggccatcgccagagggctacaacaatggggtggctccaaccctcagggtggtcctggagaacggcctggaggttcaggggacactcaatcataagctcaaggtgctgcgcgaggatggcactagggagtgggtcgagctccaggacctgaggccaggcgattgggtcatctgggttctggacgagcacaccggcacgccagtccagctcgctccactggatgagccactccatcctaacaccacgccaattcgcacacctgaggtgctgactgaggacctcgccttcctcctgggcttcttcttcggcgaggggttcgtgtcgggcgataggatcgggttctctgtccacgaggaggagccaatgcgggaggaggcgaagaggctgttccgggagctcttcggcctggagctgagggaggagaggaagccaggggaccgctcagttaccctggttgtgcggtcccgccctctggtgacgtggctccgcaagaacggcctcctgaaggggaaggcgagggagctggaggtcccgcgggctatcaggcagtccccaaggcctgttctcgctgcgttcctcaggggcctgttcgaggccgacggcacaattactgcggggtacccaatgctgacaactgcgagcaagcgcctcgctcaggatgtgatggtcctcctgggcgggctgggcattccttctaagctcctgaggtacaatccactcccaggccgcttctcaaaggctgagcattacggcgtccgggtcgttacggctaaggggctggagaggtacctggagcggatcggcgtgccaaaggggtcgcgcctggaggcgctgcacggcattaagccagacgtccgcagggagtccagctggccactgcctcatgctgagggcctcctgaagccactcctgaccgtgacggagaagggcaggaaggggtacgctagcccatacacaccactgcgcaaggacctcctgaggtacctgaggggcgagaggcagctcacagctactgggtacgccatggtcctggagaaggctcaggatctcggcctggaggctgagccattccccttcaacgagtactacgttagggtggcctccgtggagccgggcggggagatcctcacgctggatctctctgtggagggcaatcatacatacctcgccaatgggctcgtctctcataatacgtccctgggccaagtgacaatcgatggcgggacctacgacatctataggacgacacgcgtcaaccagccttccattgtggggacagccacgttcgatcagtactggagcgtgcgcacctctaagcggacttcaggaacagtgaccgtgaccgatcacttccgcgcctgggcgaaccggggcctgaacctcggcacaatagaccaaattacattgtgcgtggagggttaccaaagctctggatcagccaacatcacccagaacaccttctctcagggctcttcttccggcagttcgggtggctcatccggctccacaacgactactcgcatcgagtgtgagaacatgtccttgtccggaccctacgttagcaggatcaccaatccctttaatggtattgcgctgtacgccaacggagacacagcccgcgctaccgttaacttccccgcaagtcgcaactacaatttccgcctgcggggttgcggcaacaacaataatcttgcccgtgtggacctgaggatcgacggacggaccgtcgggaccttttattaccagggcacatacccctgggaggccccaattgacaatgtttatgtcagtgcggggagtcatacagtcgaaatcactgttactgcggataacggcacatgggacgtgtatgccgactacctggtgatacagtga

SEQ ID NO: 2995 - DNA, 2235 bp, Artificial Sequence
  Synthetic Construct, AT-152 intein modified protein encoding nucleic acids
atgcaaacaagcattactctgacatccaacgcatccggtacgtttgacggttactattacgaactctggaaggatactggcaatacaacaatgacggtctacactcaaggtcgcttttcctgccagtggtcgaacatcaataacgcgttgtttaggaccgggaagaaatacaaccagaattggcagtctcttggcacaatccggatcacgtactctgcgacttacaacccaaacgggaactcctacttgtgtatctatggctggtctaccaacccattggtcgagttctacatcgttgagtcctgggggaactggagaccgcctggtgcctgcttcgtggggtctactcgcattccgacggagcgggggctggttcctattgaggagctcgctagggagggggggtctttctacctggtgactgacaacagggctccgttcggcgggaggggcgctccactcccaggccacgggaccgccgtcaggaaggccgttcgggcgttcttcacgggcgtcaagccagtggtccggctgaggacaagggagggcctggaggttaccctcacgccagatcatctcctgctcacgccagagggctacagggaggctgggaagctgaggccaggcgagaagatcctcgtccagtccggcgaggggctgttcccaaaggaggagagcctgcctgctcaggctctcgctgttgtgcacgagagggtggcgacggctggcgggaggggcgggaggggcagggctgacgtccgcgcccagtacaggaacctccccacacgctggtcaagggagctgggcgttgctctcgggtggctgctcggcgacgggtacctgagggaggatggcgtcgggttctacttctcccggaaggacttcgctgatctggcctggctcccagacctgctccgcgattggttcggccctgggacactccaggagactcgcagcaacaccttccacctgcatttcaataggatcccggctgagttcttccaggctctcggcgtgaaggctgcgcgggcaactgagaagagggtcccagagtcgctgttccgggctcctcgcgaggctgtcgttggcttcctgcaggggctcttctctgcggacggctcagttcagattaacgagaataagcaggatgctaccgtgaggctggcctccagctcgctcgctctgctccaggacgtgcagctgctcctgctcaacctgggcatcctcgggaagattcacaagaggagggaggctgctaggaaggctctcccggacggcaagggcgggctgagggagtacccagtcgctcctcagtacgagctgattctcggcggggagaatagggatcggttcgccgaggtggtcggcttcctccaggaggagaagcagagcaagctgctcgcgttcctgaggcataggccgaggggctcgtacaggaagcccttcctcgctaccgttgcttctgtggagccagctggcgaggcgcccgtgtacgatctcacagagccagttacacactcgctcattgctaatgggctcgttgctcataatacgtccctgggccaagtgacaatcgatggcgggacctacgacatctataggacgacacgcgtcaaccagccttccattgtggggacagccacgttcgatcagtactggagcgtgcgcacctctaagcggacttcaggaacagtgaccgtgaccgatcacttccgcgcctgggcgaaccggggcctgaacctcggcacaatagaccaaattacattgtgcgtggagggttaccaaagctctggatcagccaacatcacccagaacaccttctctcagggctcttcttccggcagttcgggtggctcatccggctccacaacgactactcgcatcgagtgtgagaacatgtccttgtccggaccctacgttagcaggatcaccaatccctttaatggtattgcgctgtacgccaacggagacacagcccgcgctaccgttaacttccccgcaagtcgcaactacaatttccgcctgcggggttgcggcaacaacaataatcttgcccgtgtggacctgaggatcgacggacggaccgtcgggaccttttattaccagggcacatacccctgggaggccccaattgacaatgtttatgtcagtgcggggagtcatacagtcgaaatcactgttactgcggataacggcacatgggacgtgtatgccgactacctggtgatacagtga

SEQ ID NO: 2996 - DNA, 1572 bp, Artificial Sequence
  Synthetic Construct, AT-153 intein modified protein encoding nucleic acids
atgcaaacaagcattactctgacatccaacgcatccggtacgtttgacggttactattacgaactctggaaggatactggcaatacaacaatgacggtctacactcaaggtcgcttttcctgccagtggtcgaacatcaataacgcgttgtttaggaccgggaagaaatacaaccagaattggcagtctcttggcacaatccggatcacgtactctgcgacttacaacccaaacgggaactcctacttgtgtatctatggctggtctaccaacccattggtcgagttctacatcgttgagtcctgggggaactggagaccgcctggtgcctgcgtttcgggggagacgccagtctacctcgctgacggcaagacaattaagatcaaggacctctactcatctgagcgcaagaaggaggacaacatcgtcgaggctggctccggggaggagatcattcacctcaaggacccgatccagatctacagctacgttgatggcacgatcgtgcgctcccgctcccgcctcctgtacaaggggaagtccagctacctggtgcgcatcgagacaattggcgggcgctcagtgtccgtcactcccgtccataagctcttcgttctgaccgagaagggcatcgaggaggttatggcctcgaatctcaaagtgggggacatgattgctgctgtcgctgagagcgagtcggaggcccgggattgcggcatgagcgaggagtgcgtgatggaggcggaggtctacacctctctggaggctacgttcgaccgcgttaagtcaatcgcgtacgagaagggcgacttcgatgtgtacgatctgtcagttccagagtacggcaggaacttcattgggggggaggggctgctcgtgctccacaacacgtccctgggccaagtgacaatcgatggcgggacctacgacatctataggacgacacgcgtcaaccagccttccattgtggggacagccacgttcgatcagtactggagcgtgcgcacctctaagcggacttcaggaacagtgaccgtgaccgatcacttccgcgcctgggcgaaccggggcctgaacctcggcacaatagaccaaattacattgtgcgtggagggttaccaaagctctggatcagccaacatcacccagaacaccttctctcagggctcttcttccggcagttcgggtggctcatccggctccacaacgactactcgcatcgagtgtgagaacatgtccttgtccggaccctacgttagcaggatcaccaatccctttaatggtattgcgctgtacgccaacggagacacagcccgcgctaccgttaacttccccgcaagtcgcaactacaatttccgcctgcggggttgcggcaacaacaataatcttgcccgtgtggacctgaggatcgacggacggaccgtcgggaccttttattaccagggcacatacccctgggaggccccaattgacaatgtttatgtcagtgcggggagtcatacagtcgaaatcactgttactgcggataacggcacatgggacgtgtatgccgactacctggtgatacagtga

SEQ ID NO: 2997 - DNA, 1470 bp, Artificial Sequence
  Synthetic Construct, AT-154 intein modified protein encoding nucleic acids
atgcaaacaagcattactctgacatccaacgcatccggtacgtttgacggttactattacgaactctggaaggatactggcaatacaacaatgacggtctacactcaaggtcgcttttcctgccagtggtcgaacatcaataacgcgttgtttaggaccgggaagaaatacaaccagaattggcagtctcttggcacaatccggatcacgtactctgcgacttacaacccaaacgggaactcctacttgtgtatctatggctggtctaccaacccattggtcgagttctacatcgttgagtcctgggggaactggagaccgcctggtgcctgcctctcaggggagactgcggttatgacggtggagtacggggctattcctattcggcggctggttcaggagcggctgatctgccaggtttactcgctcgacccacagggccacctgtacacgcagcctatcgctcagtggcatttccagggcttccgcccggtgtacgcgtaccagctggaggacgggtccacaatttgcgctactccggatcaccggttcatgaccacgagcggccagatgctgcccatcgagcagattttccgcgaggggctggagctgtggcaggtggccatcgctccaccaggcgctctcgctcaggggctgaagccggccgtccagatgtcctgcatgaagattgtgggcaggaggctcgtcgggtggcaggctgtttacgatattgggctcgccggggatcataacttcctcctcgctaatggggctattgctgctaatacgtccctgggccaagtgacaatcgatggcgggacctacgacatctataggacgacacgcgtcaaccagccttccattgtggggacagccacgttcgatcagtactggagcgtgcgcacctctaagcggacttcaggaacagtgaccgtgaccgatcacttccgcgcctgggcgaaccggggcctgaacctcggcacaatagaccaaattacattgtgcgtggagggttaccaaagctctggatcagccaacatcacccagaacaccttctctcagggctcttcttccggcagttcgggtggctcatccggctccacaacgactactcgcatcgagtgtgagaacatgtccttgtccggaccctacgttagcaggatcaccaatccctttaatggtattgcgctgtacgccaacggagacacagcccgcgctaccgttaacttccccgcaagtcgcaactacaatttccgcctgcggggttgcggcaacaacaataatcttgcccgtgtggacctgaggatcgacggacggaccgtcgggaccttttattaccagggcacatacccctgggaggccccaattgacaatgtttatgtcagtgcggggagtcatacagtcgaaatcactgttactgcggataacggcacatgggacgtgtatgccgactacctggtgatacagtga

SEQ ID NO: 2998 - DNA, 1935 bp, Artificial Sequence
  Synthetic Construct, AT-155 intein modified protein encoding nucleic acids
atgcaaacaagcattactctgacatccaacgcatccggtacgtttgacggttactattacgaactctggaaggatactggcaatacaacaatgacggtctacactcaaggtcgcttttcctgccagtggtcgaacatcaataacgcgttgtttaggaccgggaagaaatacaaccagaattggcagtctcttggcacaatccggatcacgtactctgcgacttacaacccaaacgggaactcctacttgtgtatctatggctggtctaccaacccattggtcgagttctacatcgttgagtcctgggggaactggagaccgcctggtgcctgcgttaccgctgacacatgggttactaccgctgaggggccaaggcaggtggaggagctgatcggcaagaagttcacggctatcgttaacggcgaggagtgggagtccagcgaggaggggttcttcgagacagacgttaagccagtgtacaccctgaagacggctgagggcttcgagctgaggctcacggctgatcaccctgtcatgaaggttgagaggatgacacggtacaaggtggagactcagtggtccaacgctggcgacctcaagccaggggataagatcattatcaacaatcatagggacttcggcaattggagcgtcaaggggaagtacaccgagggcgaggggtacctgattggcctcctgctcggcgacgggacgatcaagaagctcaacccctggatgaaggcgatttcaaagaagatggagaaggcctccgcggatttctgcgagggcatcctgagggggctcttcgacgctgatggctctgtgcaggggaatcagtcgaagggcgtctctattcgcctggcccagtcagacgtcgagatcctcaaggcggttcagcgcattctgctcaggttcggcatcttctcgaaggtgtacatgaaccgcaggggcgagcggaaggttaagatgccggatgggaagggcggggtcaaggagtacatcaccaagccccagcacgagctcgtgatcagcaacgacaatatcctctacttcgctgagagggtcggcttctcggatgccgagaagatggagaagctggagaaggctatctggaactacaagcggaagatgaatagggagaggttcgtggctagcgtcgaggaggtggtcccagacggcgttgagaaggtgtacgacgttaagattccaggcatcaatgctttcaatgctaatggcttcgtggttcacaacacgtccctgggccaagtgacaatcgatggcgggacctacgacatctataggacgacacgcgtcaaccagccttccattgtggggacagccacgttcgatcagtactggagcgtgcgcacctctaagcggacttcaggaacagtgaccgtgaccgatcacttccgcgcctgggcgaaccggggcctgaacctcggcacaatagaccaaattacattgtgcgtggagggttaccaaagctctggatcagccaacatcacccagaacaccttctctcagggctcttcttccggcagttcgggtggctcatccggctccacaacgactactcgcatcgagtgtgagaacatgtccttgtccggaccctacgttagcaggatcaccaatccctttaatggtattgcgctgtacgccaacggagacacagcccgcgctaccgttaacttccccgcaagtcgcaactacaatttccgcctgcggggttgcggcaacaacaataatcttgcccgtgtggacctgaggatcgacggacggaccgtcgggaccttttattaccagggcacatacccctgggaggccccaattgacaatgtttatgtcagtgcggggagtcatacagtcgaaatcactgttactgcggataacggcacatgggacgtgtatgccgactacctggtgatacagtga

SEQ ID NO: 2999 - DNA, 2382 bp, Artificial Sequence
  Synthetic Construct, AT-156 intein modified protein encoding nucleic acids
atgcaaacaagcattactctgacatccaacgcatccggtacgtttgacggttactattacgaactctggaaggatactggcaatacaacaatgacggtctacactcaaggtcgcttttcctgccagtggtcgaacatcaataacgcgttgtttaggaccgggaagaaatacaaccagaattggcagtctcttggcacaatccggatcacgtactctgcgacttacaacccaaacgggaactcctacttgtgtatctatggctggtctaccaacccattggtcgagttctacatcgttgagtcctgggggaactggagaccgcctggtgcctgcttcgctaaggggactgaggtcatgatgcacgacggctctgtgaaggctattgagactatcgaggcgggggaggctgttatggggaccgacggccagccaaggaaggtggtcggcctccctcgggggagggaggtcatgtacaaggtttcccagaagacggcgcaccgggtgcataagaccgacgagacgcgcgccgctccagtcgctctcttcgagtacaactgcaatgccacacacaagctggttgtgaggactcctcggagctgccgctcgatcacccgcaagatgcagggcgttgactacaacgaggtcatcttcttcgacctcaagaagaagaagctggaggacggccgcgagatcgagattgtcaaggaggtttcgaggtcttacccagctgctgagggcgctgagaaggctgctcagatggtgaaggactactacgatgccgcgcgcgggaaggagttcttcgagtggacaatcgaggcgagggatgttagggagctcggcgctcacgtgaggaaggctactcatcaggtgtacgccccagtcctgtacgagagcgacttcttcttccattacgtgaagaactcgaagttcgctctgaggtctgaggcctcaacagctctcgcctacctcctgggcctgtgggtcggcgacgggctctccgatagggctgtgctgtccgtcgacagcgaggattccagcctcctggagcgcatcactggctacgccgacattctcgatctgagcgcggagtacaaggaccgcgagatcccgaagagggcgaagaccgtctgcctctaccccaagacgatccgcggcaacgatattcgcaggaacctgaatacggacaacccggtctggaatgccatcgttgacctcggctacctgaaggatggggttaagaatgtgccctcgtacctcttctcagactccatctgccacagggaggtgttcctcgcgggcctgattgactctgatgggcatgtccggggcgacgatgggctgtcagttacaatcaagactattcacaagaccgtcatggagggcacggtggctgtcgctaggtcgctcgggctgatcgtttctgtgaacaccgaggaggcgaagattgacaagaacgatgtgaatcaccgcttcgtctacgctatctacatttcaggcggggacgctctcctgtccgtgctcgctcattgcgctgctgcgaagaagttcagggctccaccatccaatgaggtcgttcgggggctcaagaaggtcttcttcgagatggaggagctgaaggaggacgattactacggcatcacgctcgctaaggagtcagaccatcagttcctgctcgccaatcagctcgtggttcataatacgtccctgggccaagtgacaatcgatggcgggacctacgacatctataggacgacacgcgtcaaccagccttccattgtggggacagccacgttcgatcagtactggagcgtgcgcacctctaagcggacttcaggaacagtgaccgtgaccgatcacttccgcgcctgggcgaaccggggcctgaacctcggcacaatagaccaaattacattgtgcgtggagggttaccaaagctctggatcagccaacatcacccagaacaccttctctcagggctcttcttccggcagttcgggtggctcatccggctccacaacgactactcgcatcgagtgtgagaacatgtccttgtccggaccctacgttagcaggatcaccaatccctttaatggtattgcgctgtacgccaacggagacacagcccgcgctaccgttaacttccccgcaagtcgcaactacaatttccgcctgcggggttgcggcaacaacaataatcttgcccgtgtggacctgaggatcgacggacggaccgtcgggaccttttattaccagggcacatacccctgggaggccccaattgacaatgtttatgtcagtgcggggagtcatacagtcgaaatcactgttactgcggataacggcacatgggacgtgtatgccgactacctggtgatacagtga

SEQ ID NO: 3000 - DNA, 2364 bp, Artificial Sequence
  Synthetic Construct, AT-157 intein modified protein encoding nucleic acids
atgcaaacaagcattactctgacatccaacgcatccggtacgtttgacggttactattacgaactctggaaggatactggcaatacaacaatgacggtctacactcaaggtcgcttttcctgccagtggtcgaacatcaataacgcgttgtttaggaccgggaagaaatacaaccagaattggcagtctcttggcacaatccggatcacgtactctgcgacttacaacccaaacgggaactcctacttgtgtatctatggctggtctaccaacccattggtcgagttctacatcgttgagtcctgggggaactggagaccgcctggtgcctgcttcgccaagggcactgaggttatgatgtcggatgggtcaattaaggaggtggagggcattgaggtcgggcaggaggtcatgggcaaggacggcaagccgcgggaggtggtcggcaccccatcggggcgcgagaagatgtacaaggtctctcacaagaccgctcacagggcccataagtccgacagcacgtcggagcggttcggcctcttcgagtacacatgcaacgccactcataagctggttgtgcgcacctctaggtcatgccggccgctcgtcaggaacatccagggcacggactacgtcgaggtttgcctcttcaatatgaccaagaagacgctggaggacggccgcgtgatcgatattgtcgaggagaccagcgatttctacccagcggtggaggggcctgagaaggctctcaggatcctgaaggagtacgctgaggccgacggcgggaaggagtacttcgagtggacaattgaggctcgcgatgtggctctcctgagcgctcaggtcaggaaggctacttaccagctgtcggcccccgtgctcctggagaacaatcacttctctcattacctcaaggactccaacagcgctgttggcaatgatacagtgcgggccctgtcctacttcctcgggctgtggatcggcgacgggatgctcaacaatgccgcgacgttctcagtcgattcccagaacgcgagcctcctgaacaggattaatgagttcgccgaggtgctcggcctgtctgcggagtacaaggactcacaggagccaaagcgggccaagaccgttaacctgtacgcgaaggctatccgcgacgagggcgtgaggaagaacctcgatacgcacaatctcctgtgggacgcgatcgtcgatctcggctacctgaaggacgattcgaagaacgttcctgggtacatttgctcggactctttccagcatcgggaggtgttcctggcgggcatcattgacagcacaggctacgtgtccgatgagaccgccacggtgaagactatcgaccagtccgtcatgacaggcactgtggctgtcgctaggtccctcgggattaacgttagcgtggacgtcgaggttgacgaggatggcgtcgatcggtcattcgtttacgccatctacatggacaggtccgatgctctcctggctgtcctggctaactgcgcttccaacaataagcagatcgaggctccaccacacggcgtgattagggagttcaataaggcttacttcgagatggaggagctggaggaggacgagtactacgggctgactctctcaaatgagtcggatcatcagttcctcctcgctaatcagctcgtcgtgcataatacgtccctgggccaagtgacaatcgatggcgggacctacgacatctataggacgacacgcgtcaaccagccttccattgtggggacagccacgttcgatcagtactggagcgtgcgcacctctaagcggacttcaggaacagtgaccgtgaccgatcacttccgcgcctgggcgaaccggggcctgaacctcggcacaatagaccaaattacattgtgcgtggagggttaccaaagctctggatcagccaacatcacccagaacaccttctctcagggctcttcttccggcagttcgggtggctcatccggctccacaacgactactcgcatcgagtgtgagaacatgtccttgtccggaccctacgttagcaggatcaccaatccctttaatggtattgcgctgtacgccaacggagacacagcccgcgctaccgttaacttccccgcaagtcgcaactacaatttccgcctgcggggttgcggcaacaacaataatcttgcccgtgtggacctgaggatcgacggacggaccgtcgggaccttttattaccagggcacatacccctgggaggccccaattgacaatgtttatgtcagtgcggggagtcatacagtcgaaatcactgttactgcggataacggcacatgggacgtgtatgccgactacctggtgatacagtga

SEQ ID NO: 3001 - DNA, 4868 bp, Artificial Sequence
  Synthetic Construct, AS-1 intein modified protein encoding nucleic acids in pBluescript
gcacttttcggggaaatgtgcgcggaacccctatttgtttatttttctaaatacattcaaatatgtatccgctcatgagacaataaccctgataaatgcttcaataatattgaaaaaggaagagtatgagtattcaacatttccgtgtcgcccttattcccttttttgcggcattttgccttcctgtttttgctcacccagaaacgctggtgaaagtaaaagatgctgaagatcagttgggtgcacgagtgggttacatcgaactggatctcaacagcggtaagatccttgagagttttcgccccgaagaacgttttccaatgatgagcacttttaaagttctgctatgtggcgcggtattatcccgtattgacgccgggcaagagcaactcggtcgccgcatacactattctcagaatgacttggttgagtactcaccagtcacagaaaagcatcttacggatggcatgacagtaagagaattatgcagtgctgccataaccatgagtgataacactgcggccaacttacttctgacaacgatcggaggaccgaaggagctaaccgcttttttgcacaacatgggggatcatgtaactcgccttgatcgttgggaaccggagctgaatgaagccataccaaacgacgagcgtgacaccacgatgcctgtagcaatggcaacaacgttgcgcaaactattaactggcgaactacttactctagcttcccggcaacaattaatagactggatggaggcggataaagttgcaggaccacttctgcgctcggcccttccggctggctggtttattgctgataaatctggagccggtgagcgtgggtctcgcggtatcattgcagcactggggccagatggtaagccctcccgtatcgtagttatctacacgacggggagtcaggcaactatggatgaacgaaatagacagatcgctgagataggtgcctcactgattaagcattggtaactgtcagaccaagtttactcatatatactttagattgatttaaaacttcatttttaatttaaaaggatctaggtgaagatcctttttgataatctcatgaccaaaatcccttaacgtgagttttcgttccactgagcgtcagaccccgtagaaaagatcaaaggatcttcttgagatcctttttttctgcgcgtaatctgctgcttgcaaacaaaaaaaccaccgctaccagcggtggtttgtttgccggatcaagagctaccaactctttttccgaaggtaactggcttcagcagagcgcagataccaaatactgtccttctagtgtagccgtagttaggccaccacttcaagaactctgtagcaccgcctacatacctcgctctgctaatcctgttaccagtggctgctgccagtggcgataagtcgtgtcttaccgggttggactcaagacgatagttaccggataaggcgcagcggtcgggctgaacggggggttcgtgcacacagcccagcttggagcgaacgacctacaccgaactgagatacctacagcgtgagctatgagaaagcgccacgcttcccgaagggagaaaggcggacaggtatccggtaagcggcagggtcggaacaggagagcgcacgagggagcttccagggggaaacgcctggtatctttatagtcctgtcgggtttcgccacctctgacttgagcgtcgatttttgtgatgctcgtcaggggggcggagcctatggaaaaacgccagcaacgcggcctttttacggttcctggccttttgctggccttttgctcacatgttctttcctgcgttatcccctgattctgtggataaccgtattaccgcctttgagtgagctgataccgctcgccgcagccgaacgaccgagcgcagcgagtcagtgagcgaggaagcggaagagcgcccaatacgcaaaccgcctctccccgcgcgttggccgattcattaatgcagctggcacgacaggtttcccgactggaaagcgggcagtgagcgcaacgcaattaatgtgagttagctcactcattaggcaccccaggctttacactttatgcttccggctcgtatgttgtgtggaattgtgagcggataacaatttcacacaggaaacagcatatgcaaacaagcattactctgacatccaacgcatccggtacgtttgacggttactattacgaactctggaaggatactggcaatacaacaatgacggtctacactcaaggtcgcttttcctgccagtggtcgaacatcaataacgcgttgtttaggaccgggaagaaatacaaccagaattggcagtctcttggcacaatccggatcacgtactctgcgacttacaacccaaacgggaactcctacttgtgtatctatggctggtctaccaacccattggtcgagttctacatcgttgagtcctgggggaactggagaccgcctggtgccacgtccctgggccaagtgacaatcgatggcgggacctacgacatctataggacgacacgcgtcaaccagccttgcttcatcgaggggacggaggttctcactaagcgggggttcgtggatttcagggagctgcgggaggatgatctggtcgctcagtacgacatcgagaccggcgagatttcctggacgaagccatacgcttacgtcgagcgggattacgagggctccatgtaccgcctgaagcaccctaagagcaactgggaggtggtcgctaccgagggccatgagttcatcgtgaggaatctgaagacggggaaggagcggaaggagccaatcgagaaggtcaagctccacccatactccgctattcctgttgctggcaggtacacaggggaggtggaggagtacgacctctgggagctggtctcgggcaaggggatcacactcaagactaggtctgccgttaagaacaagctgaccccgatcgagaagctcctgattgtgctccaggcggacggcacaattgattcaaagcgcaatggcaagttcactgggttccagcagctgaagttcttcttctccaagtacaggaagatcaacgagttcgagaagattctcaatgagtgcgcgccgtacggcatcaagtggaagaagtacgagcgccaggacgggattgcttacacagtttactaccccaacgatctgccgatcaagcccactaagttcttcgacgagtgggtgcgcctcgatgagatcacggaggagtggattagggagttcgtggaggagctggtcaagtgggacggccatatcccgaaggatcggaacaagaagaaggtctactactacagcaccaaggagaagcgcaataaggacttcgttcaggctctctgcgctctgggcgggatgaggacggttgtgtcgcgcgagaggaacccgaaggccaagaatcccgtctaccggatctggatctacctggaggacgattacatcaacacccagacgatggtgaaggaggagttctactacaagggcaaggtctactgcgtttctgttccaaagggcaacatcgtggttaggtacaaggattctgtctgcattgctggcaactccattgtggggacagccacgttcgatcagtactggagcgtgcgcacctctaagcggacttcaggaacagtgaccgtgaccgatcacttccgcgcctgggcgaaccggggcctgaacctcggcacaatagaccaaattacattgtgcgtggagggttaccaaagctctggatcagccaacatcacccagaacaccttctctcagggctcttcttccggcagttcgggtggctcatccggctccacaacgactactcgcatcgagtgtgagaacatgtccttgtccggaccctacgttagcaggatcaccaatccctttaatggtattgcgctgtacgccaacggagacacagcccgcgctaccgttaacttccccgcaagtcgcaactacaatttccgcctgcggggttgcggcaacaacaataatcttgcccgtgtggacctgaggatcgacggacggaccgtcgggaccttttattaccagggcacatacccctgggaggccccaattgacaatgtttatgtcagtgcggggagtcatacagtcgaaatcactgttactgcggataacggcacatgggacgtgtatgccgactacctggtgatacagtgactcgagggggggcccggtacccaattcgccctatagtgagtcgtattacaattcactggccgtcgttttacaacgtcgtgactgggaaaaccctggcgttacccaacttaatcgccttgcagcacatccccctttcgccagctggcgtaatagcgaagaggcccgcaccgatcgcccttcccaacagttgcgcagcctgaatggcgaatggaaattgtaagcgttaatattttgttaaaattcgcgttaaatttttgttaaatcagctcattttttaaccaataggccgaaatcggcaaaatcccttataaatcaaaagaatagaccgagatagggttgagtgttgttccagtttggaacaagagtccactattaaagaacgtggactccaacgtcaaagggcgaaaaaccgtctatcagggcgatggcccactacgtgaaccatcaccctaatcaagttttttggggtcgaggtgccgtaaagcactaaatcggaaccctaaagggagcccccgatttagagcttgacggggaaagccggcgaacgtggcgagaaaggaagggaagaaagcgaaaggagcgggcgctagggcgctggcaagtgtagcggtcacgctgcgcgtaaccaccacacccgccgcgcttaatgcgccgctacagggcgcgtcaggtg

SEQ ID NO: 3002 - DNA, 4289 bp, Artificial Sequence
  Synthetic Construct, AS-2 intein modified protein encoding nucleic acids in pBluescript
gcacttttcggggaaatgtgcgcggaacccctatttgtttatttttctaaatacattcaaatatgtatccgctcatgagacaataaccctgataaatgcttcaataatattgaaaaaggaagagtatgagtattcaacatttccgtgtcgcccttattcccttttttgcggcattttgccttcctgtttttgctcacccagaaacgctggtgaaagtaaaagatgctgaagatcagttgggtgcacgagtgggttacatcgaactggatctcaacagcggtaagatccttgagagttttcgccccgaagaacgttttccaatgatgagcacttttaaagttctgctatgtggcgcggtattatcccgtattgacgccgggcaagagcaactcggtcgccgcatacactattctcagaatgacttggttgagtactcaccagtcacagaaaagcatcttacggatggcatgacagtaagagaattatgcagtgctgccataaccatgagtgataacactgcggccaacttacttctgacaacgatcggaggaccgaaggagctaaccgcttttttgcacaacatgggggatcatgtaactcgccttgatcgttgggaaccggagctgaatgaagccataccaaacgacgagcgtgacaccacgatgcctgtagcaatggcaacaacgttgcgcaaactattaactggcgaactacttactctagcttcccggcaacaattaatagactggatggaggcggataaagttgcaggaccacttctgcgctcggcccttccggctggctggtttattgctgataaatctggagccggtgagcgtgggtctcgcggtatcattgcagcactggggccagatggtaagccctcccgtatcgtagttatctacacgacggggagtcaggcaactatggatgaacgaaatagacagatcgctgagataggtgcctcactgattaagcattggtaactgtcagaccaagtttactcatatatactttagattgatttaaaacttcatttttaatttaaaaggatctaggtgaagatcctttttgataatctcatgaccaaaatcccttaacgtgagttttcgttccactgagcgtcagaccccgtagaaaagatcaaaggatcttcttgagatcctttttttctgcgcgtaatctgctgcttgcaaacaaaaaaaccaccgctaccagcggtggtttgtttgccggatcaagagctaccaactctttttccgaaggtaactggcttcagcagagcgcagataccaaatactgtccttctagtgtagccgtagttaggccaccacttcaagaactctgtagcaccgcctacatacctcgctctgctaatcctgttaccagtggctgctgccagtggcgataagtcgtgtcttaccgggttggactcaagacgatagttaccggataaggcgcagcggtcgggctgaacggggggttcgtgcacacagcccagcttggagcgaacgacctacaccgaactgagatacctacagcgtgagctatgagaaagcgccacgcttcccgaagggagaaaggcggacaggtatccggtaagcggcagggtcggaacaggagagcgcacgagggagcttccagggggaaacgcctggtatctttatagtcctgtcgggtttcgccacctctgacttgagcgtcgatttttgtgatgctcgtcaggggggcggagcctatggaaaaacgccagcaacgcggcctttttacggttcctggccttttgctggccttttgctcacatgttctttcctgcgttatcccctgattctgtggataaccgtattaccgcctttgagtgagctgataccgctcgccgcagccgaacgaccgagcgcagcgagtcagtgagcgaggaagcggaagagcgcccaatacgcaaaccgcctctccccgcgcgttggccgattcattaatgcagctggcacgacaggtttcccgactggaaagcgggcagtgagcgcaacgcaattaatgtgagttagctcactcattaggcaccccaggctttacactttatgcttccggctcgtatgttgtgtggaattgtgagcggataacaatttcacacaggaaacagcatatgcaaacaagcattactctgacatccaacgcatccggtacgtttgacggttactattacgaactctggaaggatactggcaatacaacaatgacggtctacactcaaggtcgcttttcctgccagtggtcgaacatcaataacgcgttgtttaggaccgggaagaaatacaaccagaattggcagtctcttggcacaatccggatcacgtactctgcgacttacaacccaaacgggaactcctacttgtgtatctatggctggtctaccaacccattggtcgagttctacatcgttgagtcctgggggaactggagaccgcctggtgccacgtccctgggccaagtgacaatcgatggcgggacctacgacatctataggacgacacgcgtcaaccagccttgccagccttactctgcgccggtttcaactcctgatgggcctattcctatcggcaagctcgtggacgctaatgcggtcggggagaaggtgttcgacgcgtcgggcgtcaccaggattgttgctaccacgtgcaacgggaggaagccagtcctccgcatcaggacatccggcgggcacgttctcgacgtgactccagatcatctggtttggcaggtggtcgaccagaccgctggcaggttcgtgccagctggccagctccgggtcggggataggctggagtggcacgacagggccaattccgatgctatggtcgctgcgttcacggctgacagcgctgctgcggctcagccaggccagatcgttgacattctcgcgatcgatgagctgggcgtgatgcctgtctacgatattcagacagagtcgggggagtacctctcagatggcattagggttcataactccattgtggggacagccacgttcgatcagtactggagcgtgcgcacctctaagcggacttcaggaacagtgaccgtgaccgatcacttccgcgcctgggcgaaccggggcctgaacctcggcacaatagaccaaattacattgtgcgtggagggttaccaaagctctggatcagccaacatcacccagaacaccttctctcagggctcttcttccggcagttcgggtggctcatccggctccacaacgactactcgcatcgagtgtgagaacatgtccttgtccggaccctacgttagcaggatcaccaatccctttaatggtattgcgctgtacgccaacggagacacagcccgcgctaccgttaacttccccgcaagtcgcaactacaatttccgcctgcggggttgcggcaacaacaataatcttgcccgtgtggacctgaggatcgacggacggaccgtcgggaccttttattaccagggcacatacccctgggaggccccaattgacaatgtttatgtcagtgcggggagtcatacagtcgaaatcactgttactgcggataacggcacatgggacgtgtatgccgactacctggtgatacagtgactcgagggggggcccggtacccaattcgccctatagtgagtcgtattacaattcactggccgtcgttttacaacgtcgtgactgggaaaaccctggcgttacccaacttaatcgccttgcagcacatccccctttcgccagctggcgtaatagcgaagaggcccgcaccgatcgcccttcccaacagttgcgcagcctgaatggcgaatggaaattgtaagcgttaatattttgttaaaattcgcgttaaatttttgttaaatcagctcattttttaaccaataggccgaaatcggcaaaatcccttataaatcaaaagaatagaccgagatagggttgagtgttgttccagtttggaacaagagtccactattaaagaacgtggactccaacgtcaaagggcgaaaaaccgtctatcagggcgatggcccactacgtgaaccatcaccctaatcaagttttttggggtcgaggtgccgtaaagcactaaatcggaaccctaaagggagcccccgatttagagcttgacggggaaagccggcgaacgtggcgagaaaggaagggaagaaagcgaaaggagcgggcgctagggcgctggcaagtgtagcggtcacgctgcgcgtaaccaccacacccgccgcgcttaatgcgccgctacagggcgcgtcaggtg

SEQ ID NO: 3003 - DNA, 5084 bp, Artificial Sequence
  Synthetic Construct, AS-3 intein modified protein encoding nucleic acids in pBluescript
gcacttttcggggaaatgtgcgcggaacccctatttgtttatttttctaaatacattcaaatatgtatccgctcatgagacaataaccctgataaatgcttcaataatattgaaaaaggaagagtatgagtattcaacatttccgtgtcgcccttattcccttttttgcggcattttgccttcctgtttttgctcacccagaaacgctggtgaaagtaaaagatgctgaagatcagttgggtgcacgagtgggttacatcgaactggatctcaacagcggtaagatccttgagagttttcgccccgaagaacgttttccaatgatgagcacttttaaagttctgctatgtggcgcggtattatcccgtattgacgccgggcaagagcaactcggtcgccgcatacactattctcagaatgacttggttgagtactcaccagtcacagaaaagcatcttacggatggcatgacagtaagagaattatgcagtgctgccataaccatgagtgataacactgcggccaacttacttctgacaacgatcggaggaccgaaggagctaaccgcttttttgcacaacatgggggatcatgtaactcgccttgatcgttgggaaccggagctgaatgaagccataccaaacgacgagcgtgacaccacgatgcctgtagcaatggcaacaacgttgcgcaaactattaactggcgaactacttactctagcttcccggcaacaattaatagactggatggaggcggataaagttgcaggaccacttctgcgctcggcccttccggctggctggtttattgctgataaatctggagccggtgagcgtgggtctcgcggtatcattgcagcactggggccagatggtaagccctcccgtatcgtagttatctacacgacggggagtcaggcaactatggatgaacgaaatagacagatcgctgagataggtgcctcactgattaagcattggtaactgtcagaccaagtttactcatatatactttagattgatttaaaacttcatttttaatttaaaaggatctaggtgaagatcctttttgataatctcatgaccaaaatcccttaacgtgagttttcgttccactgagcgtcagaccccgtagaaaagatcaaaggatcttcttgagatcctttttttctgcgcgtaatctgctgcttgcaaacaaaaaaaccaccgctaccagcggtggtttgtttgccggatcaagagctaccaactctttttccgaaggtaactggcttcagcagagcgcagataccaaatactgtccttctagtgtagccgtagttaggccaccacttcaagaactctgtagcaccgcctacatacctcgctctgctaatcctgttaccagtggctgctgccagtggcgataagtcgtgtcttaccgggttggactcaagacgatagttaccggataaggcgcagcggtcgggctgaacggggggttcgtgcacacagcccagcttggagcgaacgacctacaccgaactgagatacctacagcgtgagctatgagaaagcgccacgcttcccgaagggagaaaggcggacaggtatccggtaagcggcagggtcggaacaggagagcgcacgagggagcttccagggggaaacgcctggtatctttatagtcctgtcgggtttcgccacctctgacttgagcgtcgatttttgtgatgctcgtcaggggggcggagcctatggaaaaacgccagcaacgcggcctttttacggttcctggccttttgctggccttttgctcacatgttctttcctgcgttatcccctgattctgtggataaccgtattaccgcctttgagtgagctgataccgctcgccgcagccgaacgaccgagcgcagcgagtcagtgagcgaggaagcggaagagcgcccaatacgcaaaccgcctctccccgcgcgttggccgattcattaatgcagctggcacgacaggtttcccgactggaaagcgggcagtgagcgcaacgcaattaatgtgagttagctcactcattaggcaccccaggctttacactttatgcttccggctcgtatgttgtgtggaattgtgagcggataacaatttcacacaggaaacagcatatgcaaacaagcattactctgacatccaacgcatccggtacgtttgacggttactattacgaactctggaaggatactggcaatacaacaatgacggtctacactcaaggtcgcttttcctgccagtggtcgaacatcaataacgcgttgtttaggaccgggaagaaatacaaccagaattggcagtctcttggcacaatccggatcacgtactctgcgacttacaacccaaacgggaactcctacttgtgtatctatggctggtctaccaacccattggtcgagttctacatcgttgagtcctgggggaactggagaccgcctggtgccacgtccctgggccaagtgacaatcgatggcgggacctacgacatctataggacgacacgcgtcaaccagccttgcgttacaggggacacaagggtcctcctcgcggacgggcagcgggttcctattcgggatctcgtggggcagacgcctgaggtcatttctgtcaacgctgagggcaggctggagccagctaagaccgacctcgtgtggtccgttggggtgcgccctctcctgcaggtcaggctggcttccggcaggaccatcaggtgcacgccagagcacaggctcaggggcctgtgggattggaaggaggcccgcgacatcagggtcggggataggctgggcattgctcgggagctcccagctccaaaggtgacgaagcgctgggctgagcacgagctggtgctcctggctcatctcgtcggcgacgggtcctacattaagggccagccactgaggtacaccacggcttcagaggcgaactccgaggctgttagcagggccgctgaggctatgggctctacagtgactaggcacccaggcagggggcagtggcatcagctcgtcatctcaggcaacgggaataggtggcacccacagggcgttgggaagtggctcaagcagctgggggtgttcggccagaggagccgggagaagcacctgccacaggaggtgttccagctcgacaatgatcagctggccctcttcctgaggcatctgtgggcgacagacggctcgatcactcaggggtctgctggccgccctaggatctacttctcgacggcctctcggcacctcatccaggatgtcgctgccctcctgctccggttcgggatcgttggccgcacaaagcacattactcatggcgacggggagggctggttcacactggatatttcgggcgctgtccagcagcagaggtacctggagaagatcggggccttcggccaccaggctcataacgctaggagggctctccagcatctgaggggcctcgtcgagaacaccaatgttgacacgctgccggaggaggtgttcaattacatccgggagcgcatgagggaggaggggattacacacaggcagatggctgctctcaggggcactgcttacggcgggagcgctcatttcaccttctccccgagcagggagacgctgctctcgtacgcggacatcctcaacgatcagcggctgcgcatgctcgccaatcagcacgttttctgggaccgcgtggtctccgtggagcccgcgggcgaggaggaggtcttcgatctcacagttccgggcaatgcttgctggctcgcggatggcatcgtttcacacaactccattgtggggacagccacgttcgatcagtactggagcgtgcgcacctctaagcggacttcaggaacagtgaccgtgaccgatcacttccgcgcctgggcgaaccggggcctgaacctcggcacaatagaccaaattacattgtgcgtggagggttaccaaagctctggatcagccaacatcacccagaacaccttctctcagggctcttcttccggcagttcgggtggctcatccggctccacaacgactactcgcatcgagtgtgagaacatgtccttgtccggaccctacgttagcaggatcaccaatccctttaatggtattgcgctgtacgccaacggagacacagcccgcgctaccgttaacttccccgcaagtcgcaactacaatttccgcctgcggggttgcggcaacaacaataatcttgcccgtgtggacctgaggatcgacggacggaccgtcgggaccttttattaccagggcacatacccctgggaggccccaattgacaatgtttatgtcagtgcggggagtcatacagtcgaaatcactgttactgcggataacggcacatgggacgtgtatgccgactacctggtgatacagtgactcgagggggggcccggtacccaattcgccctatagtgagtcgtattacaattcactggccgtcgttttacaacgtcgtgactgggaaaaccctggcgttacccaacttaatcgccttgcagcacatccccctttcgccagctggcgtaatagcgaagaggcccgcaccgatcgcccttcccaacagttgcgcagcctgaatggcgaatggaaattgtaagcgttaatattttgttaaaattcgcgttaaatttttgttaaatcagctcattttttaaccaataggccgaaatcggcaaaatcccttataaatcaaaagaatagaccgagatagggttgagtgttgttccagtttggaacaagagtccactattaaagaacgtggactccaacgtcaaagggcgaaaaaccgtctatcagggcgatggcccactacgtgaaccatcaccctaatcaagttttttggggtcgaggtgccgtaaagcactaaatcggaaccctaaagggagcccccgatttagagcttgacggggaaagccggcgaacgtggcgagaaaggaagggaagaaagcgaaaggagcgggcgctagggcgctggcaagtgtagcggtcacgctgcgcgtaaccaccacacccgccgcgcttaatgcgccgctacagggcgcgtcaggtg

SEQ ID NO: 3004 - DNA, 5645 bp, Artificial Sequence
  Synthetic Construct, AS-4 intein modified protein encoding nucleic acids in pBluescript
gcacttttcggggaaatgtgcgcggaacccctatttgtttatttttctaaatacattcaaatatgtatccgctcatgagacaataaccctgataaatgcttcaataatattgaaaaaggaagagtatgagtattcaacatttccgtgtcgcccttattcccttttttgcggcattttgccttcctgtttttgctcacccagaaacgctggtgaaagtaaaagatgctgaagatcagttgggtgcacgagtgggttacatcgaactggatctcaacagcggtaagatccttgagagttttcgccccgaagaacgttttccaatgatgagcacttttaaagttctgctatgtggcgcggtattatcccgtattgacgccgggcaagagcaactcggtcgccgcatacactattctcagaatgacttggttgagtactcaccagtcacagaaaagcatcttacggatggcatgacagtaagagaattatgcagtgctgccataaccatgagtgataacactgcggccaacttacttctgacaacgatcggaggaccgaaggagctaaccgcttttttgcacaacatgggggatcatgtaactcgccttgatcgttgggaaccggagctgaatgaagccataccaaacgacgagcgtgacaccacgatgcctgtagcaatggcaacaacgttgcgcaaactattaactggcgaactacttactctagcttcccggcaacaattaatagactggatggaggcggataaagttgcaggaccacttctgcgctcggcccttccggctggctggtttattgctgataaatctggagccggtgagcgtgggtctcgcggtatcattgcagcactggggccagatggtaagccctcccgtatcgtagttatctacacgacggggagtcaggcaactatggatgaacgaaatagacagatcgctgagataggtgcctcactgattaagcattggtaactgtcagaccaagtttactcatatatactttagattgatttaaaacttcatttttaatttaaaaggatctaggtgaagatcctttttgataatctcatgaccaaaatcccttaacgtgagttttcgttccactgagcgtcagaccccgtagaaaagatcaaaggatcttcttgagatcctttttttctgcgcgtaatctgctgcttgcaaacaaaaaaaccaccgctaccagcggtggtttgtttgccggatcaagagctaccaactctttttccgaaggtaactggcttcagcagagcgcagataccaaatactgtccttctagtgtagccgtagttaggccaccacttcaagaactctgtagcaccgcctacatacctcgctctgctaatcctgttaccagtggctgctgccagtggcgataagtcgtgtcttaccgggttggactcaagacgatagttaccggataaggcgcagcggtcgggctgaacggggggttcgtgcacacagcccagcttggagcgaacgacctacaccgaactgagatacctacagcgtgagctatgagaaagcgccacgcttcccgaagggagaaaggcggacaggtatccggtaagcggcagggtcggaacaggagagcgcacgagggagcttccagggggaaacgcctggtatctttatagtcctgtcgggtttcgccacctctgacttgagcgtcgatttttgtgatgctcgtcaggggggcggagcctatggaaaaacgccagcaacgcggcctttttacggttcctggccttttgctggccttttgctcacatgttctttcctgcgttatcccctgattctgtggataaccgtattaccgcctttgagtgagctgataccgctcgccgcagccgaacgaccgagcgcagcgagtcagtgagcgaggaagcggaagagcgcccaatacgcaaaccgcctctccccgcgcgttggccgattcattaatgcagctggcacgacaggtttcccgactggaaagcgggcagtgagcgcaacgcaattaatgtgagttagctcactcattaggcaccccaggctttacactttatgcttccggctcgtatgttgtgtggaattgtgagcggataacaatttcacacaggaaacagcatatgcaaacaagcattactctgacatccaacgcatccggtacgtttgacggttactattacgaactctggaaggatactggcaatacaacaatgacggtctacactcaaggtcgcttttcctgccagtggtcgaacatcaataacgcgttgtttaggaccgggaagaaatacaaccagaattggcagtctcttggcacaatccggatcacgtactctgcgacttacaacccaaacgggaactcctacttgtgtatctatggctggtctaccaacccattggtcgagttctacatcgttgagtcctgggggaactggagaccgcctggtgccacgtccctgggccaagtgacaatcgatggcgggacctacgacatctataggacgacacgcgtcaaccagccttgcctcgccaatgggacacagctgctgcgctacgatgggacaaaggtcaacgtggaggacgtgaaggagggggatctgctgctgggcccagacggcgggccaaggagggcgttcaacgtggtctccggcaaggaccgcctgtacaggatcaagattgacggggataaggaggatctcgttgtgaccgccaaccacatcctcgtgctgcatagggcgaaggctatgaatacgtctgtctgcttcgaccggtcaaaggagcagcagggcggggctggcgagcagctggacatttccgaggtcagcgccgcggagcgctacgataccgttgagatgacggctgctgagttcgctgctctgcacccacaggagaggtcctggtacagggctatcaggtgcccaggcttcgagctccctgagcaggacgtcccagttaacccttacttcctcggcctgtggctcggggatgagtcccggaaccagagcgctatctactcgaatcacgaggaggccctgcgcgagttcctcgtgagccatgccgcggagctggacatgcacctcgtttaccatggccagtcggcgtactctaccgtgtgcaacaaggatcgcccaacgaataagaggatcggccctgccaaccagacccagacggtcaggccaaccatccggcagacacggcgcactattaggcagcagaggctggctgctgagcacgctgctgctgagtacaccacgcagagggagacagcgtccctcactccgctcctggagtcacccacatccgacaagcatggcctcctgtccagcgtcgagactccagggaggctgtcagattccgttacaactgagctccccatgagcaggtcggcctctgctatgaggtcgatcaggaccgccagcggcctctcggagttcaacgacgtgacgaatgtctcagcttccatgccggatatccagaactctggcattaagaatcaggggaggatcgctaaggtgaccaggcagcaggactctaagggcgaggtcgatttccgccagcagtactcacaggccattaaggacgatctggagctcctggagacggacatcgaggacgatgtggcgtcgtctgacgagattgaggatgtctgcgtcgttggcagcgagaacgagctcatcgggtccgagaagcaggaccagagcggcaggaggaggcagattcacaggctgaggaccgggcataggggctacggggacctctcggacgatgagcaggagcagctcctggacagcgtggtcgagcgctacgcgggcgattcgcggctgaatacactccagcaggagctgagcaagatgggcatcctcaacccagagactgggcctatcaatgacaagaagcgcattccgcaggtgttcatgcagaacagccggtcggttcgcctgtcggtgctcgctggcctcctggactctgatgggtggtacatctaccccgagaatatgttcggcttcgctcagtccgagctgtgccacaaggagctcttctgggacgttgtgacactggctaggagcctcggcttcggggtctggacaaagaagcggatgatgccggaccccactggcaagcgcatgtcaccaatgctggtggcccagatctccggcgatctggcggagattccttgcgtcctcgctcgcaagaaggccatgccgaggctgatcccccagtctcactcattcgccatcaaggacatttctctggagtcagaggcgacggagtgggctggcttcagggtggataaggatcagctctacctcaggcatgactacgtggttctgcataattccattgtggggacagccacgttcgatcagtactggagcgtgcgcacctctaagcggacttcaggaacagtgaccgtgaccgatcacttccgcgcctgggcgaaccggggcctgaacctcggcacaatagaccaaattacattgtgcgtggagggttaccaaagctctggatcagccaacatcacccagaacaccttctctcagggctcttcttccggcagttcgggtggctcatccggctccacaacgactactcgcatcgagtgtgagaacatgtccttgtccggaccctacgttagcaggatcaccaatccctttaatggtattgcgctgtacgccaacggagacacagcccgcgctaccgttaacttccccgcaagtcgcaactacaatttccgcctgcggggttgcggcaacaacaataatcttgcccgtgtggacctgaggatcgacggacggaccgtcgggaccttttattaccagggcacatacccctgggaggccccaattgacaatgtttatgtcagtgcggggagtcatacagtcgaaatcactgttactgcggataacggcacatgggacgtgtatgccgactacctggtgatacagtgactcgagggggggcccggtacccaattcgccctatagtgagtcgtattacaattcactggccgtcgttttacaacgtcgtgactgggaaaaccctggcgttacccaacttaatcgccttgcagcacatccccctttcgccagctggcgtaatagcgaagaggcccgcaccgatcgcccttcccaacagttgcgcagcctgaatggcgaatggaaattgtaagcgttaatattttgttaaaattcgcgttaaatttttgttaaatcagctcattttttaaccaataggccgaaatcggcaaaatcccttataaatcaaaagaatagaccgagatagggttgagtgttgttccagtttggaacaagagtccactattaaagaacgtggactccaacgtcaaagggcgaaaaaccgtctatcagggcgatggcccactacgtgaaccatcaccctaatcaagttttttggggtcgaggtgccgtaaagcactaaatcggaaccctaaagggagcccccgatttagagcttgacggggaaagccggcgaacgtggcgagaaaggaagggaagaaagcgaaaggagcgggcgctagggcgctggcaagtgtagcggtcacgctgcgcgtaaccaccacacccgccgcgcttaatgcgccgctacagggcgcgtcaggtg

SEQ ID NO: 3005 - DNA, 5234 bp, Artificial Sequence
  Synthetic Construct, AS-5 intein modified protein encoding nucleic acids in pBluescript
gcacttttcggggaaatgtgcgcggaacccctatttgtttatttttctaaatacattcaaatatgtatccgctcatgagacaataaccctgataaatgcttcaataatattgaaaaaggaagagtatgagtattcaacatttccgtgtcgcccttattcccttttttgcggcattttgccttcctgtttttgctcacccagaaacgctggtgaaagtaaaagatgctgaagatcagttgggtgcacgagtgggttacatcgaactggatctcaacagcggtaagatccttgagagttttcgccccgaagaacgttttccaatgatgagcacttttaaagttctgctatgtggcgcggtattatcccgtattgacgccgggcaagagcaactcggtcgccgcatacactattctcagaatgacttggttgagtactcaccagtcacagaaaagcatcttacggatggcatgacagtaagagaattatgcagtgctgccataaccatgagtgataacactgcggccaacttacttctgacaacgatcggaggaccgaaggagctaaccgcttttttgcacaacatgggggatcatgtaactcgccttgatcgttgggaaccggagctgaatgaagccataccaaacgacgagcgtgacaccacgatgcctgtagcaatggcaacaacgttgcgcaaactattaactggcgaactacttactctagcttcccggcaacaattaatagactggatggaggcggataaagttgcaggaccacttctgcgctcggcccttccggctggctggtttattgctgataaatctggagccggtgagcgtgggtctcgcggtatcattgcagcactggggccagatggtaagccctcccgtatcgtagttatctacacgacggggagtcaggcaactatggatgaacgaaatagacagatcgctgagataggtgcctcactgattaagcattggtaactgtcagaccaagtttactcatatatactttagattgatttaaaacttcatttttaatttaaaaggatctaggtgaagatcctttttgataatctcatgaccaaaatcccttaacgtgagttttcgttccactgagcgtcagaccccgtagaaaagatcaaaggatcttcttgagatcctttttttctgcgcgtaatctgctgcttgcaaacaaaaaaaccaccgctaccagcggtggtttgtttgccggatcaagagctaccaactctttttccgaaggtaactggcttcagcagagcgcagataccaaatactgtccttctagtgtagccgtagttaggccaccacttcaagaactctgtagcaccgcctacatacctcgctctgctaatcctgttaccagtggctgctgccagtggcgataagtcgtgtcttaccgggttggactcaagacgatagttaccggataaggcgcagcggtcgggctgaacggggggttcgtgcacacagcccagcttggagcgaacgacctacaccgaactgagatacctacagcgtgagctatgagaaagcgccacgcttcccgaagggagaaaggcggacaggtatccggtaagcggcagggtcggaacaggagagcgcacgagggagcttccagggggaaacgcctggtatctttatagtcctgtcgggtttcgccacctctgacttgagcgtcgatttttgtgatgctcgtcaggggggcggagcctatggaaaaacgccagcaacgcggcctttttacggttcctggccttttgctggccttttgctcacatgttctttcctgcgttatcccctgattctgtggataaccgtattaccgcctttgagtgagctgataccgctcgccgcagccgaacgaccgagcgcagcgagtcagtgagcgaggaagcggaagagcgcccaatacgcaaaccgcctctccccgcgcgttggccgattcattaatgcagctggcacgacaggtttcccgactggaaagcgggcagtgagcgcaacgcaattaatgtgagttagctcactcattaggcaccccaggctttacactttatgcttccggctcgtatgttgtgtggaattgtgagcggataacaatttcacacaggaaacagcatatgcaaacaagcattactctgacatccaacgcatccggtacgtttgacggttactattacgaactctggaaggatactggcaatacaacaatgacggtctacactcaaggtcgcttttcctgccagtggtcgaacatcaataacgcgttgtttaggaccgggaagaaatacaaccagaattggcagtctcttggcacaatccggatcacgtactctgcgacttacaacccaaacgggaactcctacttgtgtatctatggctggtctaccaacccattggtcgagttctacatcgttgagtcctgggggaactggagaccgcctggtgccacgtccctgggccaagtgacaatcgatggcgggacctacgacatctataggacgacacgcgtcaaccagccttcgctgccaccatgggagcctatcgtggtcaggcggggggatgaggttcgggttacatcaatcggggagttcgtggattctttcctggagggcgagggcgggctggacatcggcgggctcggctactacaccctgtcgctcgatacccggacgctgaagccagtctggaggaggatccgcggcgttattaagcaccggatccgcggcaggctcctgagggtcaaggcctcaaagggccgctccatcgacctgacgggctctcattcaatctacaggattagcaggggcgggggcctggaggtggtcggctccagcgacctgaggccaggcgattctctcgtgacacctgcttcagtcgagctcccagagtccgccccttcgtctattaacgctgcgagggagctgtggagccggggggtggagggcatcttcgttgtggggctcccaggcgaggctgctgggtacaggggcgtcgagcggtcgcgcggctacgacgggggccacgctatccctctggagacgctcgtggagcgctacggcgattcggtctggtctctggtttcaggcgcgaagctcgctgtttcccggggggctgctggcgaccacccagtgcccgccaccattccgctggatacggggttctacctcctgctcggcttcatcgtgtccgctggcagcgtggacgtcgaggggggccatgttacagtgactctcggcccagggagggagggctacgtgggcgatgtcgttgaggctgtcaactccactgctccaggcgctggggtccgcatttcatccggggcgaggggcatggaggttaccatcaggagccgggtgctgtcggagctgctcgctagggtgttcggcgctgggccaggccctaatcgggacatcccctctattgtcttcagggccccgaagcccatgaagcgggttttcctgaagggcctctacgctgggggcggggtcttcgaccggagctcgggcagcctgatctacgccaccgattcccgcagcctgctcaacggcctcgctctgctcctgctcaatgtgggcgctggcgggtacaggatcgactcgggggattctggcagggctctggcgctcattgtggagaatgctggcaggctcgacgctatcggcgaggtcctggagcacctcggcttccatggcgggagggaggctgttcagggggtgggcgctctggagagggctacagctgggctcgctggccaggctactgtcgctgttcagaggccagctacccgcggcgggccaggcgtggacgtcgcgggggtgacgggcctggagcacctggaggctagcacagagttcgtctacgatctctctgtggagggggatgagaacttcttcgccgggctcgggtggattctcgtgcataattccattgtggggacagccacgttcgatcagtactggagcgtgcgcacctctaagcggacttcaggaacagtgaccgtgaccgatcacttccgcgcctgggcgaaccggggcctgaacctcggcacaatagaccaaattacattgtgcgtggagggttaccaaagctctggatcagccaacatcacccagaacaccttctctcagggctcttcttccggcagttcgggtggctcatccggctccacaacgactactcgcatcgagtgtgagaacatgtccttgtccggaccctacgttagcaggatcaccaatccctttaatggtattgcgctgtacgccaacggagacacagcccgcgctaccgttaacttccccgcaagtcgcaactacaatttccgcctgcggggttgcggcaacaacaataatcttgcccgtgtggacctgaggatcgacggacggaccgtcgggaccttttattaccagggcacatacccctgggaggccccaattgacaatgtttatgtcagtgcggggagtcatacagtcgaaatcactgttactgcggataacggcacatgggacgtgtatgccgactacctggtgatacagtgactcgagggggggcccggtacccaattcgccctatagtgagtcgtattacaattcactggccgtcgttttacaacgtcgtgactgggaaaaccctggcgttacccaacttaatcgccttgcagcacatccccctttcgccagctggcgtaatagcgaagaggcccgcaccgatcgcccttcccaacagttgcgcagcctgaatggcgaatggaaattgtaagcgttaatattttgttaaaattcgcgttaaatttttgttaaatcagctcattttttaaccaataggccgaaatcggcaaaatcccttataaatcaaaagaatagaccgagatagggttgagtgttgttccagtttggaacaagagtccactattaaagaacgtggactccaacgtcaaagggcgaaaaaccgtctatcagggcgatggcccactacgtgaaccatcaccctaatcaagttttttggggtcgaggtgccgtaaagcactaaatcggaaccctaaagggagcccccgatttagagcttgacggggaaagccggcgaacgtggcgagaaaggaagggaagaaagcgaaaggagcgggcgctagggcgctggcaagtgtagcggtcacgctgcgcgtaaccaccacacccgccgcgcttaatgcgccgctacagggcgcgtcaggtg

SEQ ID NO: 3006 - DNA, 4964 bp, Artificial Sequence
  Synthetic Construct, AS-6 intein modified protein encoding nucleic acids in pBluescript
gcacttttcggggaaatgtgcgcggaacccctatttgtttatttttctaaatacattcaaatatgtatccgctcatgagacaataaccctgataaatgcttcaataatattgaaaaaggaagagtatgagtattcaacatttccgtgtcgcccttattcccttttttgcggcattttgccttcctgtttttgctcacccagaaacgctggtgaaagtaaaagatgctgaagatcagttgggtgcacgagtgggttacatcgaactggatctcaacagcggtaagatccttgagagttttcgccccgaagaacgttttccaatgatgagcacttttaaagttctgctatgtggcgcggtattatcccgtattgacgccgggcaagagcaactcggtcgccgcatacactattctcagaatgacttggttgagtactcaccagtcacagaaaagcatcttacggatggcatgacagtaagagaattatgcagtgctgccataaccatgagtgataacactgcggccaacttacttctgacaacgatcggaggaccgaaggagctaaccgcttttttgcacaacatgggggatcatgtaactcgccttgatcgttgggaaccggagctgaatgaagccataccaaacgacgagcgtgacaccacgatgcctgtagcaatggcaacaacgttgcgcaaactattaactggcgaactacttactctagcttcccggcaacaattaatagactggatggaggcggataaagttgcaggaccacttctgcgctcggcccttccggctggctggtttattgctgataaatctggagccggtgagcgtgggtctcgcggtatcattgcagcactggggccagatggtaagccctcccgtatcgtagttatctacacgacggggagtcaggcaactatggatgaacgaaatagacagatcgctgagataggtgcctcactgattaagcattggtaactgtcagaccaagtttactcatatatactttagattgatttaaaacttcatttttaatttaaaaggatctaggtgaagatcctttttgataatctcatgaccaaaatcccttaacgtgagttttcgttccactgagcgtcagaccccgtagaaaagatcaaaggatcttcttgagatcctttttttctgcgcgtaatctgctgcttgcaaacaaaaaaaccaccgctaccagcggtggtttgtttgccggatcaagagctaccaactctttttccgaaggtaactggcttcagcagagcgcagataccaaatactgtccttctagtgtagccgtagttaggccaccacttcaagaactctgtagcaccgcctacatacctcgctctgctaatcctgttaccagtggctgctgccagtggcgataagtcgtgtcttaccgggttggactcaagacgatagttaccggataaggcgcagcggtcgggctgaacggggggttcgtgcacacagcccagcttggagcgaacgacctacaccgaactgagatacctacagcgtgagctatgagaaagcgccacgcttcccgaagggagaaaggcggacaggtatccggtaagcggcagggtcggaacaggagagcgcacgagggagcttccagggggaaacgcctggtatctttatagtcctgtcgggtttcgccacctctgacttgagcgtcgatttttgtgatgctcgtcaggggggcggagcctatggaaaaacgccagcaacgcggcctttttacggttcctggccttttgctggccttttgctcacatgttctttcctgcgttatcccctgattctgtggataaccgtattaccgcctttgagtgagctgataccgctcgccgcagccgaacgaccgagcgcagcgagtcagtgagcgaggaagcggaagagcgcccaatacgcaaaccgcctctccccgcgcgttggccgattcattaatgcagctggcacgacaggtttcccgactggaaagcgggcagtgagcgcaacgcaattaatgtgagttagctcactcattaggcaccccaggctttacactttatgcttccggctcgtatgttgtgtggaattgtgagcggataacaatttcacacaggaaacagcatatgcaaacaagcattactctgacatccaacgcatccggtacgtttgacggttactattacgaactctggaaggatactggcaatacaacaatgacggtctacactcaaggtcgcttttcctgccagtggtcgaacatcaataacgcgttgtttaggaccgggaagaaatacaaccagaattggcagtctcttggcacaatccggatcacgtactctgcgacttacaacccaaacgggaactcctacttgtgtatctatggctggtctaccaacccattggtcgagttctacatcgttgagtcctgggggaactggagaccgcctggtgccacgtccctgggccaagtgacaatcgatggcgggacctacgacatctataggacgacacgcgtcaaccagccttgcttcgctcctgagacactcgtgcataccgctgatgggcctcggcctattcgggatctccagcagggggatctcgttctgggcatcagcggccgctacagggaggttacccacaagttcgtgtacaaccagacggacgctatgctcgccatccgcgtcaagcacgccgttgagccaattgaggttacagctggccatcctttctacgccatcaggggcgtgccactggagcagtcgggggagcgcaccctcaggcagctggagtccggcaagcggagcccagagtggatcgacgctggcgagctggagaggggggattacatggcccaggtcatcccatctgaggtggtccctgtcgcgggcttcgacgaggacgatgctcgcctctacgggatcctcctgggcgatgggcatctcagcaagaatggcctgcagtggggcgtctcggggcacccacagagggacgggcacatggatttcgttagggcgtacctgtccgctcggggcatccacttctgggagaccgcgagggacgagacgtacgggcagattcattgggctagcggcaggggggtccgcagggatgctaccacgggcaggatcacaggcgctggggctgcgactctccctttcgagcacgccgacctgtacgatgagcagggccggaagcgcatcgctaggcgcttctcacatctcccaaggcagcagtccctcgctctgatcaggtcgctcctggagtctgacggcggggtgtctcgcggcaaggagatctacttcacaaacacttcaaggcccctcattgagggcctgaggtaccagctcctgaggctgggcgtgccaaccgctgggcagtacagggagaggaggcaggaccacgtcggccagagggctgatgggtcgccaatcaggttcgagggcgtgtgcaaggcgtacgacctcaggattccggctgttccagaggtggctcagctggtcggctgccagccaatcgccaagcggaattggattacgtggcagggctgcgtctactccaggatccgggatgttcagccgattgcggtgaagcccttcgtcttcgatctcaaggtggagggggatgagagctacatgactacttccgggctcgctcacaactccattgtggggacagccacgttcgatcagtactggagcgtgcgcacctctaagcggacttcaggaacagtgaccgtgaccgatcacttccgcgcctgggcgaaccggggcctgaacctcggcacaatagaccaaattacattgtgcgtggagggttaccaaagctctggatcagccaacatcacccagaacaccttctctcagggctcttcttccggcagttcgggtggctcatccggctccacaacgactactcgcatcgagtgtgagaacatgtccttgtccggaccctacgttagcaggatcaccaatccctttaatggtattgcgctgtacgccaacggagacacagcccgcgctaccgttaacttccccgcaagtcgcaactacaatttccgcctgcggggttgcggcaacaacaataatcttgcccgtgtggacctgaggatcgacggacggaccgtcgggaccttttattaccagggcacatacccctgggaggccccaattgacaatgtttatgtcagtgcggggagtcatacagtcgaaatcactgttactgcggataacggcacatgggacgtgtatgccgactacctggtgatacagtgactcgagggggggcccggtacccaattcgccctatagtgagtcgtattacaattcactggccgtcgttttacaacgtcgtgactgggaaaaccctggcgttacccaacttaatcgccttgcagcacatccccctttcgccagctggcgtaatagcgaagaggcccgcaccgatcgcccttcccaacagttgcgcagcctgaatggcgaatggaaattgtaagcgttaatattttgttaaaattcgcgttaaatttttgttaaatcagctcattttttaaccaataggccgaaatcggcaaaatcccttataaatcaaaagaatagaccgagatagggttgagtgttgttccagtttggaacaagagtccactattaaagaacgtggactccaacgtcaaagggcgaaaaaccgtctatcagggcgatggcccactacgtgaaccatcaccctaatcaagttttttggggtcgaggtgccgtaaagcactaaatcggaaccctaaagggagcccccgatttagagcttgacggggaaagccggcgaacgtggcgagaaaggaagggaagaaagcgaaaggagcgggcgctagggcgctggcaagtgtagcggtcacgctgcgcgtaaccaccacacccgccgcgcttaatgcgccgctacagggcgcgtcaggtg

SEQ ID NO: 3007 - DNA, 5294 bp, Artificial Sequence
  Synthetic Construct, AS-7 intein modified protein encoding nucleic acids in pBluescript
gcacttttcggggaaatgtgcgcggaacccctatttgtttatttttctaaatacattcaaatatgtatccgctcatgagacaataaccctgataaatgcttcaataatattgaaaaaggaagagtatgagtattcaacatttccgtgtcgcccttattcccttttttgcggcattttgccttcctgtttttgctcacccagaaacgctggtgaaagtaaaagatgctgaagatcagttgggtgcacgagtgggttacatcgaactggatctcaacagcggtaagatccttgagagttttcgccccgaagaacgttttccaatgatgagcacttttaaagttctgctatgtggcgcggtattatcccgtattgacgccgggcaagagcaactcggtcgccgcatacactattctcagaatgacttggttgagtactcaccagtcacagaaaagcatcttacggatggcatgacagtaagagaattatgcagtgctgccataaccatgagtgataacactgcggccaacttacttctgacaacgatcggaggaccgaaggagctaaccgcttttttgcacaacatgggggatcatgtaactcgccttgatcgttgggaaccggagctgaatgaagccataccaaacgacgagcgtgacaccacgatgcctgtagcaatggcaacaacgttgcgcaaactattaactggcgaactacttactctagcttcccggcaacaattaatagactggatggaggcggataaagttgcaggaccacttctgcgctcggcccttccggctggctggtttattgctgataaatctggagccggtgagcgtgggtctcgcggtatcattgcagcactggggccagatggtaagccctcccgtatcgtagttatctacacgacggggagtcaggcaactatggatgaacgaaatagacagatcgctgagataggtgcctcactgattaagcattggtaactgtcagaccaagtttactcatatatactttagattgatttaaaacttcatttttaatttaaaaggatctaggtgaagatcctttttgataatctcatgaccaaaatcccttaacgtgagttttcgttccactgagcgtcagaccccgtagaaaagatcaaaggatcttcttgagatcctttttttctgcgcgtaatctgctgcttgcaaacaaaaaaaccaccgctaccagcggtggtttgtttgccggatcaagagctaccaactctttttccgaaggtaactggcttcagcagagcgcagataccaaatactgtccttctagtgtagccgtagttaggccaccacttcaagaactctgtagcaccgcctacatacctcgctctgctaatcctgttaccagtggctgctgccagtggcgataagtcgtgtcttaccgggttggactcaagacgatagttaccggataaggcgcagcggtcgggctgaacggggggttcgtgcacacagcccagcttggagcgaacgacctacaccgaactgagatacctacagcgtgagctatgagaaagcgccacgcttcccgaagggagaaaggcggacaggtatccggtaagcggcagggtcggaacaggagagcgcacgagggagcttccagggggaaacgcctggtatctttatagtcctgtcgggtttcgccacctctgacttgagcgtcgatttttgtgatgctcgtcaggggggcggagcctatggaaaaacgccagcaacgcggcctttttacggttcctggccttttgctggccttttgctcacatgttctttcctgcgttatcccctgattctgtggataaccgtattaccgcctttgagtgagctgataccgctcgccgcagccgaacgaccgagcgcagcgagtcagtgagcgaggaagcggaagagcgcccaatacgcaaaccgcctctccccgcgcgttggccgattcattaatgcagctggcacgacaggtttcccgactggaaagcgggcagtgagcgcaacgcaattaatgtgagttagctcactcattaggcaccccaggctttacactttatgcttccggctcgtatgttgtgtggaattgtgagcggataacaatttcacacaggaaacagcatatgcaaacaagcattactctgacatccaacgcatccggtacgtttgacggttactattacgaactctggaaggatactggcaatacaacaatgacggtctacactcaaggtcgcttttcctgccagtggtcgaacatcaataacgcgttgtttaggaccgggaagaaatacaaccagaattggcagtctcttggcacaatccggatcacgtactctgcgacttacaacccaaacgggaactcctacttgtgtatctatggctggtctaccaacccattggtcgagttctacatcgttgagtcctgggggaactggagaccgcctggtgccacgtccctgggccaagtgacaatcgatggcgggacctacgacatctataggacgacacgcgtcaaccagccttgcctctcgggggatactgaggtcgttctcgggaatggcatggacgtggttctgctgacggatctcgtggacggggcgtgcgtttcgacaatcgagccaaggactggcgtggtcagcccatcgctcatcgaccattacttcgccaaggatgcgacccgcgtcctcaagatcacgctggacgatggcagggttattaaggctgacccagagcaccctctgttcgctgctaaggtggatgagaccacgcgcggcctcaccgggcagtggctgagggtggaggagctcacggtcggccaccatgctctcctggtgtcgccacagcaggcttactgcacctctgagcagtggacactcactctgtcagagaaggaggtctgcaccgcttccacggctcagctcgctaagcagctgtccgagatcggcctggtcggggttccgattcccctctctaaggtgaagtcagctgccaggctgttcggcctcgtcctgtccgctggcgacttcagcgggaagctctacgtggagaaggacgaggatgttacagccgtgaacagcgacctcactgcgctgggcttctcgccagctcactgggtccggtaccaggacgatcagcagaagtggttcaagtgcgacgattcgaacggcaaggcgatctgcattaccctggtccctacggctaatgctctcctgcagaccctcggggctcacgacgctgagaagcagcatcggtactgcctcctgccaaagtggctcctggatgcccctacgtccatcaagagggagttcctcggcgctctgttcggcgggaacggggcccacatcacaatttcgtgcaatgagggcaagtgggagccgactatgtctgcgctcacacagcacactgacgctgatcatctggagagcacagttgtgtacctcaagcaggttgccactctcctgggcatgctgaacatctgctccagcgtgtcgtctgagaagcacattacagccgagaagactgggtacgcggtccacctgcatgttgacaacacggcggagaatctcgttcggttctacgagcaagtgggctaccgctactgcttcaataagacatcccagtcatccgcccccgtgcagtggatcaaggggtctctgttcttcattgagcagcaccgctcaaagtgccagcatgctttcgagctcctgcacaccggcctcgggacgaaggctgctgtctccgccgagatcaacatgccacaccataatcctagccacatgctgaacgttaaggagatcccgaccgctcccgccgacgagtacatcacgtggattgagttcaaggatcgctacgtgcataaggagtccccgcggttcgtgtgggtcaccatccacagcattgaggaggcgcccgctgagaggctctacgacttcaatacggtttcgcagaatcatagcttcttcgccaacagcatcgtctctcataattccattgtggggacagccacgttcgatcagtactggagcgtgcgcacctctaagcggacttcaggaacagtgaccgtgaccgatcacttccgcgcctgggcgaaccggggcctgaacctcggcacaatagaccaaattacattgtgcgtggagggttaccaaagctctggatcagccaacatcacccagaacaccttctctcagggctcttcttccggcagttcgggtggctcatccggctccacaacgactactcgcatcgagtgtgagaacatgtccttgtccggaccctacgttagcaggatcaccaatccctttaatggtattgcgctgtacgccaacggagacacagcccgcgctaccgttaacttccccgcaagtcgcaactacaatttccgcctgcggggttgcggcaacaacaataatcttgcccgtgtggacctgaggatcgacggacggaccgtcgggaccttttattaccagggcacatacccctgggaggccccaattgacaatgtttatgtcagtgcggggagtcatacagtcgaaatcactgttactgcggataacggcacatgggacgtgtatgccgactacctggtgatacagtgactcgagggggggcccggtacccaattcgccctatagtgagtcgtattacaattcactggccgtcgttttacaacgtcgtgactgggaaaaccctggcgttacccaacttaatcgccttgcagcacatccccctttcgccagctggcgtaatagcgaagaggcccgcaccgatcgcccttcccaacagttgcgcagcctgaatggcgaatggaaattgtaagcgttaatattttgttaaaattcgcgttaaatttttgttaaatcagctcattttttaaccaataggccgaaatcggcaaaatcccttataaatcaaaagaatagaccgagatagggttgagtgttgttccagtttggaacaagagtccactattaaagaacgtggactccaacgtcaaagggcgaaaaaccgtctatcagggcgatggcccactacgtgaaccatcaccctaatcaagttttttggggtcgaggtgccgtaaagcactaaatcggaaccctaaagggagcccccgatttagagcttgacggggaaagccggcgaacgtggcgagaaaggaagggaagaaagcgaaaggagcgggcgctagggcgctggcaagtgtagcggtcacgctgcgcgtaaccaccacacccgccgcgcttaatgcgccgctacagggcgcgtcaggtg

SEQ ID NO: 3008 - DNA, 5087 bp, Artificial Sequence
  Synthetic Construct, AS-8 intein modified protein encoding nucleic acids in pBluescript
gcacttttcggggaaatgtgcgcggaacccctatttgtttatttttctaaatacattcaaatatgtatccgctcatgagacaataaccctgataaatgcttcaataatattgaaaaaggaagagtatgagtattcaacatttccgtgtcgcccttattcccttttttgcggcattttgccttcctgtttttgctcacccagaaacgctggtgaaagtaaaagatgctgaagatcagttgggtgcacgagtgggttacatcgaactggatctcaacagcggtaagatccttgagagttttcgccccgaagaacgttttccaatgatgagcacttttaaagttctgctatgtggcgcggtattatcccgtattgacgccgggcaagagcaactcggtcgccgcatacactattctcagaatgacttggttgagtactcaccagtcacagaaaagcatcttacggatggcatgacagtaagagaattatgcagtgctgccataaccatgagtgataacactgcggccaacttacttctgacaacgatcggaggaccgaaggagctaaccgcttttttgcacaacatgggggatcatgtaactcgccttgatcgttgggaaccggagctgaatgaagccataccaaacgacgagcgtgacaccacgatgcctgtagcaatggcaacaacgttgcgcaaactattaactggcgaactacttactctagcttcccggcaacaattaatagactggatggaggcggataaagttgcaggaccacttctgcgctcggcccttccggctggctggtttattgctgataaatctggagccggtgagcgtgggtctcgcggtatcattgcagcactggggccagatggtaagccctcccgtatcgtagttatctacacgacggggagtcaggcaactatggatgaacgaaatagacagatcgctgagataggtgcctcactgattaagcattggtaactgtcagaccaagtttactcatatatactttagattgatttaaaacttcatttttaatttaaaaggatctaggtgaagatcctttttgataatctcatgaccaaaatcccttaacgtgagttttcgttccactgagcgtcagaccccgtagaaaagatcaaaggatcttcttgagatcctttttttctgcgcgtaatctgctgcttgcaaacaaaaaaaccaccgctaccagcggtggtttgtttgccggatcaagagctaccaactctttttccgaaggtaactggcttcagcagagcgcagataccaaatactgtccttctagtgtagccgtagttaggccaccacttcaagaactctgtagcaccgcctacatacctcgctctgctaatcctgttaccagtggctgctgccagtggcgataagtcgtgtcttaccgggttggactcaagacgatagttaccggataaggcgcagcggtcgggctgaacggggggttcgtgcacacagcccagcttggagcgaacgacctacaccgaactgagatacctacagcgtgagctatgagaaagcgccacgcttcccgaagggagaaaggcggacaggtatccggtaagcggcagggtcggaacaggagagcgcacgagggagcttccagggggaaacgcctggtatctttatagtcctgtcgggtttcgccacctctgacttgagcgtcgatttttgtgatgctcgtcaggggggcggagcctatggaaaaacgccagcaacgcggcctttttacggttcctggccttttgctggccttttgctcacatgttctttcctgcgttatcccctgattctgtggataaccgtattaccgcctttgagtgagctgataccgctcgccgcagccgaacgaccgagcgcagcgagtcagtgagcgaggaagcggaagagcgcccaatacgcaaaccgcctctccccgcgcgttggccgattcattaatgcagctggcacgacaggtttcccgactggaaagcgggcagtgagcgcaacgcaattaatgtgagttagctcactcattaggcaccccaggctttacactttatgcttccggctcgtatgttgtgtggaattgtgagcggataacaatttcacacaggaaacagcatatgcaaacaagcattactctgacatccaacgcatccggtacgtttgacggttactattacgaactctggaaggatactggcaatacaacaatgacggtctacactcaaggtcgcttttcctgccagtggtcgaacatcaataacgcgttgtttaggaccgggaagaaatacaaccagaattggcagtctcttggcacaatccggatcacgtactctgcgacttacaacccaaacgggaactcctacttgtgtatctatggctggtctaccaacccattggtcgagttctacatcgttgagtcctgggggaactggagaccgcctggtgccacgtccctgggccaagtgacaatcgatggcgggacctacgacatctataggacgacacgcgtcaaccagccttgcttcgggcgggatacccctctcctcatggcggacggcactactaagttcgttcaggacattaaggctctggatcagctcatgggcgacgattgcacgccgcgcatcgtccaggagaggtctctcgttcacgagtcaggggctctgtacagggtggtccccaagaacgccaatggccacgacgcgttcgtgtgcaacaaggagcatatcctcgtgatggtcaatgttaagcagccgtgggtcagccagacggttatcgacggcgtggatcagttccatgtctcggaggttgtgtgcatcgggaacattccgacagtgcgctccagcggcaatttcgcttctgctgtcgaggctacgaaggctctgccagcttggacactcctgatctgggagattagcgtgctggagtacctggcggtcgacgctgatctcaggcagcacttcatgatctacaagccagctggcgggattgagtacccaaccacgacaaacctggacatcgtgcagcacttcggcgccgagtcggttcccaacctggagcatgccgtgatgtggtgcatcggcctgtggattctcctgggggacgtcgatacagccggcaacccagttctcatcctgagcggcattgaccacctccatcctctgatcaagactctccactcgcattctcagaagctgtcaatttccttcaccaaccagctcgacgagggggtcgctgatatcagcaagccaaccatcattgccctcggcgacaagttcgggctcctgttcaagtccctgggcatcgagagcgctgagtgcattcctgatgccctcctgaggtcgtctaagctccacagggctgctctcctggctggcctggtggaggggagcaacgctttctcgatcgtcaaggacactccaaagcattgggatatttcctgcaagaacaatatgatcttcgagaatattaagaggctctcatccagcctcggcctgtgcgttgacacggtgacaccagcgactatcacccagcaggtgtccgtcaagacgctgcagatccggatttcgggccctcgcatgcactacgtgtctgagctcatcagcaacgactcgctgaagactacctctgtcgtttcaatcgattcctggctgaacgtcaagtcaaatgcctgcgagttcgagatcgagtccattggctgcggggagtacttcggcttcacagttatggggccaaactcaaggttcctcctcggggatttcacagtcacacacaactccattgtggggacagccacgttcgatcagtactggagcgtgcgcacctctaagcggacttcaggaacagtgaccgtgaccgatcacttccgcgcctgggcgaaccggggcctgaacctcggcacaatagaccaaattacattgtgcgtggagggttaccaaagctctggatcagccaacatcacccagaacaccttctctcagggctcttcttccggcagttcgggtggctcatccggctccacaacgactactcgcatcgagtgtgagaacatgtccttgtccggaccctacgttagcaggatcaccaatccctttaatggtattgcgctgtacgccaacggagacacagcccgcgctaccgttaacttccccgcaagtcgcaactacaatttccgcctgcggggttgcggcaacaacaataatcttgcccgtgtggacctgaggatcgacggacggaccgtcgggaccttttattaccagggcacatacccctgggaggccccaattgacaatgtttatgtcagtgcggggagtcatacagtcgaaatcactgttactgcggataacggcacatgggacgtgtatgccgactacctggtgatacagtgactcgagggggggcccggtacccaattcgccctatagtgagtcgtattacaattcactggccgtcgttttacaacgtcgtgactgggaaaaccctggcgttacccaacttaatcgccttgcagcacatccccctttcgccagctggcgtaatagcgaagaggcccgcaccgatcgcccttcccaacagttgcgcagcctgaatggcgaatggaaattgtaagcgttaatattttgttaaaattcgcgttaaatttttgttaaatcagctcattttttaaccaataggccgaaatcggcaaaatcccttataaatcaaaagaatagaccgagatagggttgagtgttgttccagtttggaacaagagtccactattaaagaacgtggactccaacgtcaaagggcgaaaaaccgtctatcagggcgatggcccactacgtgaaccatcaccctaatcaagttttttggggtcgaggtgccgtaaagcactaaatcggaaccctaaagggagcccccgatttagagcttgacggggaaagccggcgaacgtggcgagaaaggaagggaagaaagcgaaaggagcgggcgctagggcgctggcaagtgtagcggtcacgctgcgcgtaaccaccacacccgccgcgcttaatgcgccgctacagggcgcgtcaggtg

SEQ ID NO: 3009 - DNA, 4985 bp, Artificial Sequence
  Synthetic Construct, AS-9 intein modified protein encoding nucleic acids in pBluescript
gcacttttcggggaaatgtgcgcggaacccctatttgtttatttttctaaatacattcaaatatgtatccgctcatgagacaataaccctgataaatgcttcaataatattgaaaaaggaagagtatgagtattcaacatttccgtgtcgcccttattcccttttttgcggcattttgccttcctgtttttgctcacccagaaacgctggtgaaagtaaaagatgctgaagatcagttgggtgcacgagtgggttacatcgaactggatctcaacagcggtaagatccttgagagttttcgccccgaagaacgttttccaatgatgagcacttttaaagttctgctatgtggcgcggtattatcccgtattgacgccgggcaagagcaactcggtcgccgcatacactattctcagaatgacttggttgagtactcaccagtcacagaaaagcatcttacggatggcatgacagtaagagaattatgcagtgctgccataaccatgagtgataacactgcggccaacttacttctgacaacgatcggaggaccgaaggagctaaccgcttttttgcacaacatgggggatcatgtaactcgccttgatcgttgggaaccggagctgaatgaagccataccaaacgacgagcgtgacaccacgatgcctgtagcaatggcaacaacgttgcgcaaactattaactggcgaactacttactctagcttcccggcaacaattaatagactggatggaggcggataaagttgcaggaccacttctgcgctcggcccttccggctggctggtttattgctgataaatctggagccggtgagcgtgggtctcgcggtatcattgcagcactggggccagatggtaagccctcccgtatcgtagttatctacacgacggggagtcaggcaactatggatgaacgaaatagacagatcgctgagataggtgcctcactgattaagcattggtaactgtcagaccaagtttactcatatatactttagattgatttaaaacttcatttttaatttaaaaggatctaggtgaagatcctttttgataatctcatgaccaaaatcccttaacgtgagttttcgttccactgagcgtcagaccccgtagaaaagatcaaaggatcttcttgagatcctttttttctgcgcgtaatctgctgcttgcaaacaaaaaaaccaccgctaccagcggtggtttgtttgccggatcaagagctaccaactctttttccgaaggtaactggcttcagcagagcgcagataccaaatactgtccttctagtgtagccgtagttaggccaccacttcaagaactctgtagcaccgcctacatacctcgctctgctaatcctgttaccagtggctgctgccagtggcgataagtcgtgtcttaccgggttggactcaagacgatagttaccggataaggcgcagcggtcgggctgaacggggggttcgtgcacacagcccagcttggagcgaacgacctacaccgaactgagatacctacagcgtgagctatgagaaagcgccacgcttcccgaagggagaaaggcggacaggtatccggtaagcggcagggtcggaacaggagagcgcacgagggagcttccagggggaaacgcctggtatctttatagtcctgtcgggtttcgccacctctgacttgagcgtcgatttttgtgatgctcgtcaggggggcggagcctatggaaaaacgccagcaacgcggcctttttacggttcctggccttttgctggccttttgctcacatgttctttcctgcgttatcccctgattctgtggataaccgtattaccgcctttgagtgagctgataccgctcgccgcagccgaacgaccgagcgcagcgagtcagtgagcgaggaagcggaagagcgcccaatacgcaaaccgcctctccccgcgcgttggccgattcattaatgcagctggcacgacaggtttcccgactggaaagcgggcagtgagcgcaacgcaattaatgtgagttagctcactcattaggcaccccaggctttacactttatgcttccggctcgtatgttgtgtggaattgtgagcggataacaatttcacacaggaaacagcatatgcaaacaagcattactctgacatccaacgcatccggtacgtttgacggttactattacgaactctggaaggatactggcaatacaacaatgacggtctacactcaaggtcgcttttcctgccagtggtcgaacatcaataacgcgttgtttaggaccgggaagaaatacaaccagaattggcagtctcttggcacaatccggatcacgtactctgcgacttacaacccaaacgggaactcctacttgtgtatctatggctggtctaccaacccattggtcgagttctacatcgttgagtcctgggggaactggagaccgcctggtgccacgtccctgggccaagtgacaatcgatggcgggacctacgacatctataggacgacacgcgtcaaccagccttgcgttacgggggagacgctgctgctgacggagaatggctacgagaaggccgctgatctctacaagaagcagaacaatctgaaggttgtgatcgacaacaggacaaaggacttcgctgtggatagcaagggcaccacgatcgtcgacgctattccaatgcagctgacgaagaaggatgccgagatcttcaaggtcaagaccaagcagggctacgagattcgcgcgacggagtggcacaagttctacgttaagagggacggcgagatccagaagctgcagctcaaccagctgaagaccggggataagctcctggtccagtccgctgagggcgcttacgggaagatccatgagcccgacctcgcctacattatgggcatcattgcgggcgatgggaccatcacggagaagaccgccaagatctacctctacgacaacaagaaggtgctggagcagaaggttacggatgcggtgcacaggatcattcacaagcataaggtcgaccgggcttacaagcataatacatcactcctgccaactttcaacatggcgaatcctgagaagcaggacctcctgtacatgaactccacagttctgttcgatatcctcaagaagttcggcatgaataaggagcgcaagactagggtcccggagttcattttccaggccaacaaggagacacaggccgcgtacctgagcggcctcttccagactgacgggtgcgtgaacgcgaatcacaaggctaaggccctgaccatcgagctcacgtccattcattacgagagcctgcaggatgttcagaagctcctgctcaatatgggcgtgtacacaactatctactcgaacaataagcggtctcaggagctgctcccagacgggaagggcgggtcgaagctctacaacgtcaagcccacccacaagatctcaattcaggatcgcaactcccgcgagctgttcatgagcatcgtcgagctcaaggactacgatgtttacaagttcaacctgctcacagagactctccagccgaagtcgcgcaagcccaagcacgacttcacggccgagatcatttctatcgaggaggacggcgtggaggatgtctacgatactactcaggaggattaccactctctcatcttcaatggcatcgttacgggcaactccattgtggggacagccacgttcgatcagtactggagcgtgcgcacctctaagcggacttcaggaacagtgaccgtgaccgatcacttccgcgcctgggcgaaccggggcctgaacctcggcacaatagaccaaattacattgtgcgtggagggttaccaaagctctggatcagccaacatcacccagaacaccttctctcagggctcttcttccggcagttcgggtggctcatccggctccacaacgactactcgcatcgagtgtgagaacatgtccttgtccggaccctacgttagcaggatcaccaatccctttaatggtattgcgctgtacgccaacggagacacagcccgcgctaccgttaacttccccgcaagtcgcaactacaatttccgcctgcggggttgcggcaacaacaataatcttgcccgtgtggacctgaggatcgacggacggaccgtcgggaccttttattaccagggcacatacccctgggaggccccaattgacaatgtttatgtcagtgcggggagtcatacagtcgaaatcactgttactgcggataacggcacatgggacgtgtatgccgactacctggtgatacagtgactcgagggggggcccggtacccaattcgccctatagtgagtcgtattacaattcactggccgtcgttttacaacgtcgtgactgggaaaaccctggcgttacccaacttaatcgccttgcagcacatccccctttcgccagctggcgtaatagcgaagaggcccgcaccgatcgcccttcccaacagttgcgcagcctgaatggcgaatggaaattgtaagcgttaatattttgttaaaattcgcgttaaatttttgttaaatcagctcattttttaaccaataggccgaaatcggcaaaatcccttataaatcaaaagaatagaccgagatagggttgagtgttgttccagtttggaacaagagtccactattaaagaacgtggactccaacgtcaaagggcgaaaaaccgtctatcagggcgatggcccactacgtgaaccatcaccctaatcaagttttttggggtcgaggtgccgtaaagcactaaatcggaaccctaaagggagcccccgatttagagcttgacggggaaagccggcgaacgtggcgagaaaggaagggaagaaagcgaaaggagcgggcgctagggcgctggcaagtgtagcggtcacgctgcgcgtaaccaccacacccgccgcgcttaatgcgccgctacagggcgcgtcaggtg

SEQ ID NO: 3010 - DNA, 4940 bp, Artificial Sequence
  Synthetic Construct, AS-10 intein modified protein encoding nucleic acids in pBluescript
gcacttttcggggaaatgtgcgcggaacccctatttgtttatttttctaaatacattcaaatatgtatccgctcatgagacaataaccctgataaatgcttcaataatattgaaaaaggaagagtatgagtattcaacatttccgtgtcgcccttattcccttttttgcggcattttgccttcctgtttttgctcacccagaaacgctggtgaaagtaaaagatgctgaagatcagttgggtgcacgagtgggttacatcgaactggatctcaacagcggtaagatccttgagagttttcgccccgaagaacgttttccaatgatgagcacttttaaagttctgctatgtggcgcggtattatcccgtattgacgccgggcaagagcaactcggtcgccgcatacactattctcagaatgacttggttgagtactcaccagtcacagaaaagcatcttacggatggcatgacagtaagagaattatgcagtgctgccataaccatgagtgataacactgcggccaacttacttctgacaacgatcggaggaccgaaggagctaaccgcttttttgcacaacatgggggatcatgtaactcgccttgatcgttgggaaccggagctgaatgaagccataccaaacgacgagcgtgacaccacgatgcctgtagcaatggcaacaacgttgcgcaaactattaactggcgaactacttactctagcttcccggcaacaattaatagactggatggaggcggataaagttgcaggaccacttctgcgctcggcccttccggctggctggtttattgctgataaatctggagccggtgagcgtgggtctcgcggtatcattgcagcactggggccagatggtaagccctcccgtatcgtagttatctacacgacggggagtcaggcaactatggatgaacgaaatagacagatcgctgagataggtgcctcactgattaagcattggtaactgtcagaccaagtttactcatatatactttagattgatttaaaacttcatttttaatttaaaaggatctaggtgaagatcctttttgataatctcatgaccaaaatcccttaacgtgagttttcgttccactgagcgtcagaccccgtagaaaagatcaaaggatcttcttgagatcctttttttctgcgcgtaatctgctgcttgcaaacaaaaaaaccaccgctaccagcggtggtttgtttgccggatcaagagctaccaactctttttccgaaggtaactggcttcagcagagcgcagataccaaatactgtccttctagtgtagccgtagttaggccaccacttcaagaactctgtagcaccgcctacatacctcgctctgctaatcctgttaccagtggctgctgccagtggcgataagtcgtgtcttaccgggttggactcaagacgatagttaccggataaggcgcagcggtcgggctgaacggggggttcgtgcacacagcccagcttggagcgaacgacctacaccgaactgagatacctacagcgtgagctatgagaaagcgccacgcttcccgaagggagaaaggcggacaggtatccggtaagcggcagggtcggaacaggagagcgcacgagggagcttccagggggaaacgcctggtatctttatagtcctgtcgggtttcgccacctctgacttgagcgtcgatttttgtgatgctcgtcaggggggcggagcctatggaaaaacgccagcaacgcggcctttttacggttcctggccttttgctggccttttgctcacatgttctttcctgcgttatcccctgattctgtggataaccgtattaccgcctttgagtgagctgataccgctcgccgcagccgaacgaccgagcgcagcgagtcagtgagcgaggaagcggaagagcgcccaatacgcaaaccgcctctccccgcgcgttggccgattcattaatgcagctggcacgacaggtttcccgactggaaagcgggcagtgagcgcaacgcaattaatgtgagttagctcactcattaggcaccccaggctttacactttatgcttccggctcgtatgttgtgtggaattgtgagcggataacaatttcacacaggaaacagcatatgcaaacaagcattactctgacatccaacgcatccggtacgtttgacggttactattacgaactctggaaggatactggcaatacaacaatgacggtctacactcaaggtcgcttttcctgccagtggtcgaacatcaataacgcgttgtttaggaccgggaagaaatacaaccagaattggcagtctcttggcacaatccggatcacgtactctgcgacttacaacccaaacgggaactcctacttgtgtatctatggctggtctaccaacccattggtcgagttctacatcgttgagtcctgggggaactggagaccgcctggtgccacgtccctgggccaagtgacaatcgatggcgggacctacgacatctataggacgacacgcgtcaaccagccttgcgttaccgctgacacactcatcgctactgacagggggctggagaggatcggcaacatcgtgggggagtctaggggcatcaagtctattgacggcaagctccactgggtcgagaacatcttcccgacagggactaagcccgtttaccagctgaggaccaagtctggctaccagctgaagctcaccggggatcatgtggtcttcacggagaataggggcgacgtcaaggcttgcgagctgaggaaggacgatatggtccggctcgttggcgctccattcgggaaggagaccacgggctccacagatatcgcccagctcattgggctcctgactggcgacgggtgcatcacaactgccaacgagattgctgcttcgggcgagcagaggaggaccgcgttcctgacggtttctaaggctgagcaggagattgcggagtgggctaaccagttcatcaatacgctgaggccggagctcggcgagcacaataagtcggggtctgtgaccgagacggccaccacggcgcgggttgctgtgggctccccacgcatcctcaagcagttcgaggcgttcgctgttctggataagggcagcgtgcataagctcttcacagacaaggtgttccagctggctcagtcggagcaggctgctctcctgaggggcctgttcacagctgacgggactgtcgccaactactccgataagtcccagtacatcgctctggacgctacgagcctggagctcctgcagcaggtccagctcctgctcttcaacttcggcatcaagtccaagatctacgagaataggagggtgggcgagctcgtctccctgctcccagacgggaagggcgggatcaaggagtaccctgtgcagcagatgcacagcctcaggatctcgcggtccagccgcattctgttcgagcagcagatcggcttcatggccgagtcgaagaagtacgaggccctggcggagctcaaccgcacagtgtccacttacagggacagcgcgtacgatgctgtcgcctctctgacctactcaggcgaggaggccgttttcgatctcacggagccggagacggatcatttcattgctaatggcattggggttcataattccattgtggggacagccacgttcgatcagtactggagcgtgcgcacctctaagcggacttcaggaacagtgaccgtgaccgatcacttccgcgcctgggcgaaccggggcctgaacctcggcacaatagaccaaattacattgtgcgtggagggttaccaaagctctggatcagccaacatcacccagaacaccttctctcagggctcttcttccggcagttcgggtggctcatccggctccacaacgactactcgcatcgagtgtgagaacatgtccttgtccggaccctacgttagcaggatcaccaatccctttaatggtattgcgctgtacgccaacggagacacagcccgcgctaccgttaacttccccgcaagtcgcaactacaatttccgcctgcggggttgcggcaacaacaataatcttgcccgtgtggacctgaggatcgacggacggaccgtcgggaccttttattaccagggcacatacccctgggaggccccaattgacaatgtttatgtcagtgcggggagtcatacagtcgaaatcactgttactgcggataacggcacatgggacgtgtatgccgactacctggtgatacagtgactcgagggggggcccggtacccaattcgccctatagtgagtcgtattacaattcactggccgtcgttttacaacgtcgtgactgggaaaaccctggcgttacccaacttaatcgccttgcagcacatccccctttcgccagctggcgtaatagcgaagaggcccgcaccgatcgcccttcccaacagttgcgcagcctgaatggcgaatggaaattgtaagcgttaatattttgttaaaattcgcgttaaatttttgttaaatcagctcattttttaaccaataggccgaaatcggcaaaatcccttataaatcaaaagaatagaccgagatagggttgagtgttgttccagtttggaacaagagtccactattaaagaacgtggactccaacgtcaaagggcgaaaaaccgtctatcagggcgatggcccactacgtgaaccatcaccctaatcaagttttttggggtcgaggtgccgtaaagcactaaatcggaaccctaaagggagcccccgatttagagcttgacggggaaagccggcgaacgtggcgagaaaggaagggaagaaagcgaaaggagcgggcgctagggcgctggcaagtgtagcggtcacgctgcgcgtaaccaccacacccgccgcgcttaatgcgccgctacagggcgcgtcaggtg

SEQ ID NO: 3011 - DNA, 4658 bp, Artificial Sequence
  Synthetic Construct, AS-11 intein modified protein encoding nucleic acids in pBluescript
gcacttttcggggaaatgtgcgcggaacccctatttgtttatttttctaaatacattcaaatatgtatccgctcatgagacaataaccctgataaatgcttcaataatattgaaaaaggaagagtatgagtattcaacatttccgtgtcgcccttattcccttttttgcggcattttgccttcctgtttttgctcacccagaaacgctggtgaaagtaaaagatgctgaagatcagttgggtgcacgagtgggttacatcgaactggatctcaacagcggtaagatccttgagagttttcgccccgaagaacgttttccaatgatgagcacttttaaagttctgctatgtggcgcggtattatcccgtattgacgccgggcaagagcaactcggtcgccgcatacactattctcagaatgacttggttgagtactcaccagtcacagaaaagcatcttacggatggcatgacagtaagagaattatgcagtgctgccataaccatgagtgataacactgcggccaacttacttctgacaacgatcggaggaccgaaggagctaaccgcttttttgcacaacatgggggatcatgtaactcgccttgatcgttgggaaccggagctgaatgaagccataccaaacgacgagcgtgacaccacgatgcctgtagcaatggcaacaacgttgcgcaaactattaactggcgaactacttactctagcttcccggcaacaattaatagactggatggaggcggataaagttgcaggaccacttctgcgctcggcccttccggctggctggtttattgctgataaatctggagccggtgagcgtgggtctcgcggtatcattgcagcactggggccagatggtaagccctcccgtatcgtagttatctacacgacggggagtcaggcaactatggatgaacgaaatagacagatcgctgagataggtgcctcactgattaagcattggtaactgtcagaccaagtttactcatatatactttagattgatttaaaacttcatttttaatttaaaaggatctaggtgaagatcctttttgataatctcatgaccaaaatcccttaacgtgagttttcgttccactgagcgtcagaccccgtagaaaagatcaaaggatcttcttgagatcctttttttctgcgcgtaatctgctgcttgcaaacaaaaaaaccaccgctaccagcggtggtttgtttgccggatcaagagctaccaactctttttccgaaggtaactggcttcagcagagcgcagataccaaatactgtccttctagtgtagccgtagttaggccaccacttcaagaactctgtagcaccgcctacatacctcgctctgctaatcctgttaccagtggctgctgccagtggcgataagtcgtgtcttaccgggttggactcaagacgatagttaccggataaggcgcagcggtcgggctgaacggggggttcgtgcacacagcccagcttggagcgaacgacctacaccgaactgagatacctacagcgtgagctatgagaaagcgccacgcttcccgaagggagaaaggcggacaggtatccggtaagcggcagggtcggaacaggagagcgcacgagggagcttccagggggaaacgcctggtatctttatagtcctgtcgggtttcgccacctctgacttgagcgtcgatttttgtgatgctcgtcaggggggcggagcctatggaaaaacgccagcaacgcggcctttttacggttcctggccttttgctggccttttgctcacatgttctttcctgcgttatcccctgattctgtggataaccgtattaccgcctttgagtgagctgataccgctcgccgcagccgaacgaccgagcgcagcgagtcagtgagcgaggaagcggaagagcgcccaatacgcaaaccgcctctccccgcgcgttggccgattcattaatgcagctggcacgacaggtttcccgactggaaagcgggcagtgagcgcaacgcaattaatgtgagttagctcactcattaggcaccccaggctttacactttatgcttccggctcgtatgttgtgtggaattgtgagcggataacaatttcacacaggaaacagcatatgcaaacaagcattactctgacatccaacgcatccggtacgtttgacggttactattacgaactctggaaggatactggcaatacaacaatgacggtctacactcaaggtcgcttttcctgccagtggtcgaacatcaataacgcgttgtttaggaccgggaagaaatacaaccagaattggcagtctcttggcacaatccggatcacgtactctgcgacttacaacccaaacgggaactcctacttgtgtatctatggctggtctaccaacccattggtcgagttctacatcgttgagtcctgggggaactggagaccgcctggtgccacgtccctgggccaagtgacaatcgatggcgggacctacgacatctataggacgacacgcgtcaaccagccttgcctccatggggattcgctcatcgtgacagatcatgggctcgttcctatgcgggaggtcgtgaatcatcgccagcggctgcaggtctcagacggcgagaggcagcagacagtgtacgactggaaccggttcgccgattacccaaccgtcacgatgaggaccagggcgggcttcacactgactgggtcccacaatcatcgcatcatgctcgctgacggcacctggaggaggctggacgagctccagatcggggatcgggtgcgcattgctggcgggaccgagctgtgggctacggagccagctctcctgaggtgcaggaggccgctgcccagggtcctcgttaccgctggcgccccggccgcgaccacgtccagcccccacaggcgggggtacaggagggctgctgctgtggtcgttgacgagaagctcgctgctgctatcggcaggcgctgcgttacgcatgctgaccagcaggccctggatgcgattaggaggtcgccaaggcctcaggtggtcgcgttcctccgcgctttctgccagggcgctgggcagtcggtcgcttctggcctgaccctcacgtgcgctgacgctgatctggccacaactgtgcagctcctgctcacaaacctgggcgtcctcgcgcacaggactgacaccacggttcggattgataatggcgacgatctggagagggcttacacaactctcgccacaccgactggctggaccgacgaggttgtggcgctggagcatgggacggctgatgtctacgacatttctgttactgctactcatcgctacgctgctcagggcttcatcaaccacaactccattgtggggacagccacgttcgatcagtactggagcgtgcgcacctctaagcggacttcaggaacagtgaccgtgaccgatcacttccgcgcctgggcgaaccggggcctgaacctcggcacaatagaccaaattacattgtgcgtggagggttaccaaagctctggatcagccaacatcacccagaacaccttctctcagggctcttcttccggcagttcgggtggctcatccggctccacaacgactactcgcatcgagtgtgagaacatgtccttgtccggaccctacgttagcaggatcaccaatccctttaatggtattgcgctgtacgccaacggagacacagcccgcgctaccgttaacttccccgcaagtcgcaactacaatttccgcctgcggggttgcggcaacaacaataatcttgcccgtgtggacctgaggatcgacggacggaccgtcgggaccttttattaccagggcacatacccctgggaggccccaattgacaatgtttatgtcagtgcggggagtcatacagtcgaaatcactgttactgcggataacggcacatgggacgtgtatgccgactacctggtgatacagtgactcgagggggggcccggtacccaattcgccctatagtgagtcgtattacaattcactggccgtcgttttacaacgtcgtgactgggaaaaccctggcgttacccaacttaatcgccttgcagcacatccccctttcgccagctggcgtaatagcgaagaggcccgcaccgatcgcccttcccaacagttgcgcagcctgaatggcgaatggaaattgtaagcgttaatattttgttaaaattcgcgttaaatttttgttaaatcagctcattttttaaccaataggccgaaatcggcaaaatcccttataaatcaaaagaatagaccgagatagggttgagtgttgttccagtttggaacaagagtccactattaaagaacgtggactccaacgtcaaagggcgaaaaaccgtctatcagggcgatggcccactacgtgaaccatcaccctaatcaagttttttggggtcgaggtgccgtaaagcactaaatcggaaccctaaagggagcccccgatttagagcttgacggggaaagccggcgaacgtggcgagaaaggaagggaagaaagcgaaaggagcgggcgctagggcgctggcaagtgtagcggtcacgctgcgcgtaaccaccacacccgccgcgcttaatgcgccgctacagggcgcgtcaggtg

SEQ ID NO: 3012 - DNA, 4268 bp, Artificial Sequence
  Synthetic Construct, AS-12 intein modified protein encoding nucleic acids in pBluescript
gcacttttcggggaaatgtgcgcggaacccctatttgtttatttttctaaatacattcaaatatgtatccgctcatgagacaataaccctgataaatgcttcaataatattgaaaaaggaagagtatgagtattcaacatttccgtgtcgcccttattcccttttttgcggcattttgccttcctgtttttgctcacccagaaacgctggtgaaagtaaaagatgctgaagatcagttgggtgcacgagtgggttacatcgaactggatctcaacagcggtaagatccttgagagttttcgccccgaagaacgttttccaatgatgagcacttttaaagttctgctatgtggcgcggtattatcccgtattgacgccgggcaagagcaactcggtcgccgcatacactattctcagaatgacttggttgagtactcaccagtcacagaaaagcatcttacggatggcatgacagtaagagaattatgcagtgctgccataaccatgagtgataacactgcggccaacttacttctgacaacgatcggaggaccgaaggagctaaccgcttttttgcacaacatgggggatcatgtaactcgccttgatcgttgggaaccggagctgaatgaagccataccaaacgacgagcgtgacaccacgatgcctgtagcaatggcaacaacgttgcgcaaactattaactggcgaactacttactctagcttcccggcaacaattaatagactggatggaggcggataaagttgcaggaccacttctgcgctcggcccttccggctggctggtttattgctgataaatctggagccggtgagcgtgggtctcgcggtatcattgcagcactggggccagatggtaagccctcccgtatcgtagttatctacacgacggggagtcaggcaactatggatgaacgaaatagacagatcgctgagataggtgcctcactgattaagcattggtaactgtcagaccaagtttactcatatatactttagattgatttaaaacttcatttttaatttaaaaggatctaggtgaagatcctttttgataatctcatgaccaaaatcccttaacgtgagttttcgttccactgagcgtcagaccccgtagaaaagatcaaaggatcttcttgagatcctttttttctgcgcgtaatctgctgcttgcaaacaaaaaaaccaccgctaccagcggtggtttgtttgccggatcaagagctaccaactctttttccgaaggtaactggcttcagcagagcgcagataccaaatactgtccttctagtgtagccgtagttaggccaccacttcaagaactctgtagcaccgcctacatacctcgctctgctaatcctgttaccagtggctgctgccagtggcgataagtcgtgtcttaccgggttggactcaagacgatagttaccggataaggcgcagcggtcgggctgaacggggggttcgtgcacacagcccagcttggagcgaacgacctacaccgaactgagatacctacagcgtgagctatgagaaagcgccacgcttcccgaagggagaaaggcggacaggtatccggtaagcggcagggtcggaacaggagagcgcacgagggagcttccagggggaaacgcctggtatctttatagtcctgtcgggtttcgccacctctgacttgagcgtcgatttttgtgatgctcgtcaggggggcggagcctatggaaaaacgccagcaacgcggcctttttacggttcctggccttttgctggccttttgctcacatgttctttcctgcgttatcccctgattctgtggataaccgtattaccgcctttgagtgagctgataccgctcgccgcagccgaacgaccgagcgcagcgagtcagtgagcgaggaagcggaagagcgcccaatacgcaaaccgcctctccccgcgcgttggccgattcattaatgcagctggcacgacaggtttcccgactggaaagcgggcagtgagcgcaacgcaattaatgtgagttagctcactcattaggcaccccaggctttacactttatgcttccggctcgtatgttgtgtggaattgtgagcggataacaatttcacacaggaaacagcatatgcaaacaagcattactctgacatccaacgcatccggtacgtttgacggttactattacgaactctggaaggatactggcaatacaacaatgacggtctacactcaaggtcgcttttcctgccagtggtcgaacatcaataacgcgttgtttaggaccgggaagaaatacaaccagaattggcagtctcttggcacaatccggatcacgtactctgcgacttacaacccaaacgggaactcctacttgtgtatctatggctggtctaccaacccattggtcgagttctacatcgttgagtcctgggggaactggagaccgcctggtgccacgtccctgggccaagtgacaatcgatggcgggacctacgacatctataggacgacacgcgtcaaccagccttgcgtgacaggggacactctcatctgcctcgctgacgggcgccgcgttcctattcaggatctcgtggggcattcgccggaggttattgcggtcgacgataagggccgcctcgtttgcgctaagtcagaggtcatctggaaggtcggcgagcggtccgttttcgagatcaagctggcttccgggaggagcattaaggctaccgctgagcacaggctcctggcgttcaagggctggaggcatgttaaggacttcaaagtgggggataggctcgctattgctcaccaggtcccagagccagacaggctcctgcagcattgccagtcggacctgttctgggataggatcgtgtcgattgaggagaaggggtctgaggaggtctacgatctcacagttccaaagtacgcttcttggctcgcggatggggttgtttcacataattccattgtggggacagccacgttcgatcagtactggagcgtgcgcacctctaagcggacttcaggaacagtgaccgtgaccgatcacttccgcgcctgggcgaaccggggcctgaacctcggcacaatagaccaaattacattgtgcgtggagggttaccaaagctctggatcagccaacatcacccagaacaccttctctcagggctcttcttccggcagttcgggtggctcatccggctccacaacgactactcgcatcgagtgtgagaacatgtccttgtccggaccctacgttagcaggatcaccaatccctttaatggtattgcgctgtacgccaacggagacacagcccgcgctaccgttaacttccccgcaagtcgcaactacaatttccgcctgcggggttgcggcaacaacaataatcttgcccgtgtggacctgaggatcgacggacggaccgtcgggaccttttattaccagggcacatacccctgggaggccccaattgacaatgtttatgtcagtgcggggagtcatacagtcgaaatcactgttactgcggataacggcacatgggacgtgtatgccgactacctggtgatacagtgactcgagggggggcccggtacccaattcgccctatagtgagtcgtattacaattcactggccgtcgttttacaacgtcgtgactgggaaaaccctggcgttacccaacttaatcgccttgcagcacatccccctttcgccagctggcgtaatagcgaagaggcccgcaccgatcgcccttcccaacagttgcgcagcctgaatggcgaatggaaattgtaagcgttaatattttgttaaaattcgcgttaaatttttgttaaatcagctcattttttaaccaataggccgaaatcggcaaaatcccttataaatcaaaagaatagaccgagatagggttgagtgttgttccagtttggaacaagagtccactattaaagaacgtggactccaacgtcaaagggcgaaaaaccgtctatcagggcgatggcccactacgtgaaccatcaccctaatcaagttttttggggtcgaggtgccgtaaagcactaaatcggaaccctaaagggagcccccgatttagagcttgacggggaaagccggcgaacgtggcgagaaaggaagggaagaaagcgaaaggagcgggcgctagggcgctggcaagtgtagcggtcacgctgcgcgtaaccaccacacccgccgcgcttaatgcgccgctacagggcgcgtcaggtg

SEQ ID NO: 3013 - DNA, 5198 bp, Artificial Sequence
  Synthetic Construct, AS-13 intein modified protein encoding nucleic acids in pBluescript
gcacttttcggggaaatgtgcgcggaacccctatttgtttatttttctaaatacattcaaatatgtatccgctcatgagacaataaccctgataaatgcttcaataatattgaaaaaggaagagtatgagtattcaacatttccgtgtcgcccttattcccttttttgcggcattttgccttcctgtttttgctcacccagaaacgctggtgaaagtaaaagatgctgaagatcagttgggtgcacgagtgggttacatcgaactggatctcaacagcggtaagatccttgagagttttcgccccgaagaacgttttccaatgatgagcacttttaaagttctgctatgtggcgcggtattatcccgtattgacgccgggcaagagcaactcggtcgccgcatacactattctcagaatgacttggttgagtactcaccagtcacagaaaagcatcttacggatggcatgacagtaagagaattatgcagtgctgccataaccatgagtgataacactgcggccaacttacttctgacaacgatcggaggaccgaaggagctaaccgcttttttgcacaacatgggggatcatgtaactcgccttgatcgttgggaaccggagctgaatgaagccataccaaacgacgagcgtgacaccacgatgcctgtagcaatggcaacaacgttgcgcaaactattaactggcgaactacttactctagcttcccggcaacaattaatagactggatggaggcggataaagttgcaggaccacttctgcgctcggcccttccggctggctggtttattgctgataaatctggagccggtgagcgtgggtctcgcggtatcattgcagcactggggccagatggtaagccctcccgtatcgtagttatctacacgacggggagtcaggcaactatggatgaacgaaatagacagatcgctgagataggtgcctcactgattaagcattggtaactgtcagaccaagtttactcatatatactttagattgatttaaaacttcatttttaatttaaaaggatctaggtgaagatcctttttgataatctcatgaccaaaatcccttaacgtgagttttcgttccactgagcgtcagaccccgtagaaaagatcaaaggatcttcttgagatcctttttttctgcgcgtaatctgctgcttgcaaacaaaaaaaccaccgctaccagcggtggtttgtttgccggatcaagagctaccaactctttttccgaaggtaactggcttcagcagagcgcagataccaaatactgtccttctagtgtagccgtagttaggccaccacttcaagaactctgtagcaccgcctacatacctcgctctgctaatcctgttaccagtggctgctgccagtggcgataagtcgtgtcttaccgggttggactcaagacgatagttaccggataaggcgcagcggtcgggctgaacggggggttcgtgcacacagcccagcttggagcgaacgacctacaccgaactgagatacctacagcgtgagctatgagaaagcgccacgcttcccgaagggagaaaggcggacaggtatccggtaagcggcagggtcggaacaggagagcgcacgagggagcttccagggggaaacgcctggtatctttatagtcctgtcgggtttcgccacctctgacttgagcgtcgatttttgtgatgctcgtcaggggggcggagcctatggaaaaacgccagcaacgcggcctttttacggttcctggccttttgctggccttttgctcacatgttctttcctgcgttatcccctgattctgtggataaccgtattaccgcctttgagtgagctgataccgctcgccgcagccgaacgaccgagcgcagcgagtcagtgagcgaggaagcggaagagcgcccaatacgcaaaccgcctctccccgcgcgttggccgattcattaatgcagctggcacgacaggtttcccgactggaaagcgggcagtgagcgcaacgcaattaatgtgagttagctcactcattaggcaccccaggctttacactttatgcttccggctcgtatgttgtgtggaattgtgagcggataacaatttcacacaggaaacagcatatgcaaacaagcattactctgacatccaacgcatccggtacgtttgacggttactattacgaactctggaaggatactggcaatacaacaatgacggtctacactcaaggtcgcttttcctgccagtggtcgaacatcaataacgcgttgtttaggaccgggaagaaatacaaccagaattggcagtctcttggcacaatccggatcacgtactctgcgacttacaacccaaacgggaactcctacttgtgtatctatggctggtctaccaacccattggtcgagttctacatcgttgagtcctgggggaactggagaccgcctggtgccacgtccctgggccaagtgacaatcgatggcgggacctacgacatctataggacgacacgcgtcaaccagccttgcctgacatcggaccatacggttctcactacaaggggctggattcctatcgctgacgttactctggatgacaaggtcgctgttctcgacaacaatacgggcgagatgtcctaccagaacccacagaaggtccacaagtacgactacgagggccctatgtacgaggttaagactgccggggtcgatctgttcgttaccccaaaccataggatgtatgtgaataccacgaacaatacaactaaccagaattacaacctcgttgaggcttccagcatcttcggcaagaaggtgcggtacaagaacgacgcgatctggaataagaccgattaccagttcattctcccggagacagccactctgaccgggcacacgaacaagatctcgtctacaccggcgattcagcccgagatgaacgcttggctcacgttcttcggcctgtggatcgcgaacgggcataccacgaagattgccgagaagacagcggagaacaatcagcagaagcagcgctacaaggtcatcctgacgcaggtgaaggaggacgtctgcgatatcattgagcagacactcaacaagctgggcttcaatttcatcaggtccgggaaggactacacgattgagaacaagcagctctggagctacctgaatccgttcgacaacggcgccctcaataagtacctgcccgattgggtctgggagctctcatcccagcagtgcaagatcctcctgaacagcctctgcctgggcaattgcctgttcactaagaacgacgataccctccactacttctccaccagcgagaggttcgctaacgacgtgtcgcgcctcgctctgcatgctggcacaacttctactatccagctggaggccgcgccatcaaacctgtacgataccatcattgggctccctgttgaagtgaataccacgctgtggcgggtcatcattaaccagagctcgttctactcgtactctactgacaagtcttcagccctcaacctgagcaacaatgttgcgtgctacgtgaacgcgcagagcgctctcacactggagcagaactcgcagaagatcaataagaacactctcgtcctgaccaagaacaatgttaagtcacagacgatgcactcccagagggctgagagggtggacacggctctcctgacacagaaggagctcgataattcgctgaaccatgagatcctgattaataagaacccgggcacctctcagctggagtgcgtggtcaatcccgaggtcaacaatacgtccacaaacgataggttcgtgtactacaaggggccggtctactgcctcactgggcctaacaatgttttctacgttcagaggaatggcaaggctgtttggactggcaactccattgtggggacagccacgttcgatcagtactggagcgtgcgcacctctaagcggacttcaggaacagtgaccgtgaccgatcacttccgcgcctgggcgaaccggggcctgaacctcggcacaatagaccaaattacattgtgcgtggagggttaccaaagctctggatcagccaacatcacccagaacaccttctctcagggctcttcttccggcagttcgggtggctcatccggctccacaacgactactcgcatcgagtgtgagaacatgtccttgtccggaccctacgttagcaggatcaccaatccctttaatggtattgcgctgtacgccaacggagacacagcccgcgctaccgttaacttccccgcaagtcgcaactacaatttccgcctgcggggttgcggcaacaacaataatcttgcccgtgtggacctgaggatcgacggacggaccgtcgggaccttttattaccagggcacatacccctgggaggccccaattgacaatgtttatgtcagtgcggggagtcatacagtcgaaatcactgttactgcggataacggcacatgggacgtgtatgccgactacctggtgatacagtgactcgagggggggcccggtacccaattcgccctatagtgagtcgtattacaattcactggccgtcgttttacaacgtcgtgactgggaaaaccctggcgttacccaacttaatcgccttgcagcacatccccctttcgccagctggcgtaatagcgaagaggcccgcaccgatcgcccttcccaacagttgcgcagcctgaatggcgaatggaaattgtaagcgttaatattttgttaaaattcgcgttaaatttttgttaaatcagctcattttttaaccaataggccgaaatcggcaaaatcccttataaatcaaaagaatagaccgagatagggttgagtgttgttccagtttggaacaagagtccactattaaagaacgtggactccaacgtcaaagggcgaaaaaccgtctatcagggcgatggcccactacgtgaaccatcaccctaatcaagttttttggggtcgaggtgccgtaaagcactaaatcggaaccctaaagggagcccccgatttagagcttgacggggaaagccggcgaacgtggcgagaaaggaagggaagaaagcgaaaggagcgggcgctagggcgctggcaagtgtagcggtcacgctgcgcgtaaccaccacacccgccgcgcttaatgcgccgctacagggcgcgtcaggtg

SEQ ID NO: 3014 - DNA, 4865 bp, Artificial Sequence
  Synthetic Construct, AS-14 intein modified protein encoding nucleic acids in pBluescript
gcacttttcggggaaatgtgcgcggaacccctatttgtttatttttctaaatacattcaaatatgtatccgctcatgagacaataaccctgataaatgcttcaataatattgaaaaaggaagagtatgagtattcaacatttccgtgtcgcccttattcccttttttgcggcattttgccttcctgtttttgctcacccagaaacgctggtgaaagtaaaagatgctgaagatcagttgggtgcacgagtgggttacatcgaactggatctcaacagcggtaagatccttgagagttttcgccccgaagaacgttttccaatgatgagcacttttaaagttctgctatgtggcgcggtattatcccgtattgacgccgggcaagagcaactcggtcgccgcatacactattctcagaatgacttggttgagtactcaccagtcacagaaaagcatcttacggatggcatgacagtaagagaattatgcagtgctgccataaccatgagtgataacactgcggccaacttacttctgacaacgatcggaggaccgaaggagctaaccgcttttttgcacaacatgggggatcatgtaactcgccttgatcgttgggaaccggagctgaatgaagccataccaaacgacgagcgtgacaccacgatgcctgtagcaatggcaacaacgttgcgcaaactattaactggcgaactacttactctagcttcccggcaacaattaatagactggatggaggcggataaagttgcaggaccacttctgcgctcggcccttccggctggctggtttattgctgataaatctggagccggtgagcgtgggtctcgcggtatcattgcagcactggggccagatggtaagccctcccgtatcgtagttatctacacgacggggagtcaggcaactatggatgaacgaaatagacagatcgctgagataggtgcctcactgattaagcattggtaactgtcagaccaagtttactcatatatactttagattgatttaaaacttcatttttaatttaaaaggatctaggtgaagatcctttttgataatctcatgaccaaaatcccttaacgtgagttttcgttccactgagcgtcagaccccgtagaaaagatcaaaggatcttcttgagatcctttttttctgcgcgtaatctgctgcttgcaaacaaaaaaaccaccgctaccagcggtggtttgtttgccggatcaagagctaccaactctttttccgaaggtaactggcttcagcagagcgcagataccaaatactgtccttctagtgtagccgtagttaggccaccacttcaagaactctgtagcaccgcctacatacctcgctctgctaatcctgttaccagtggctgctgccagtggcgataagtcgtgtcttaccgggttggactcaagacgatagttaccggataaggcgcagcggtcgggctgaacggggggttcgtgcacacagcccagcttggagcgaacgacctacaccgaactgagatacctacagcgtgagctatgagaaagcgccacgcttcccgaagggagaaaggcggacaggtatccggtaagcggcagggtcggaacaggagagcgcacgagggagcttccagggggaaacgcctggtatctttatagtcctgtcgggtttcgccacctctgacttgagcgtcgatttttgtgatgctcgtcaggggggcggagcctatggaaaaacgccagcaacgcggcctttttacggttcctggccttttgctggccttttgctcacatgttctttcctgcgttatcccctgattctgtggataaccgtattaccgcctttgagtgagctgataccgctcgccgcagccgaacgaccgagcgcagcgagtcagtgagcgaggaagcggaagagcgcccaatacgcaaaccgcctctccccgcgcgttggccgattcattaatgcagctggcacgacaggtttcccgactggaaagcgggcagtgagcgcaacgcaattaatgtgagttagctcactcattaggcaccccaggctttacactttatgcttccggctcgtatgttgtgtggaattgtgagcggataacaatttcacacaggaaacagcatatgcaaacaagcattactctgacatccaacgcatccggtacgtttgacggttactattacgaactctggaaggatactggcaatacaacaatgacggtctacactcaaggtcgcttttcctgccagtggtcgaacatcaataacgcgttgtttaggaccgggaagaaatacaaccagaattggcagtctcttggcacaatccggatcacgtactctgcgacttacaacccaaacgggaactcctacttgtgtatctatggctggtctaccaacccattggtcgagttctacatcgttgagtcctgggggaactggagaccgcctggtgccacgtccctgggccaagtgacaatcgatggcgggacctacgacatctataggacgacacgcgtcaaccagccttgcgttacgggggacactctcgttttcactgacaaggggctgattgaggctcgcaagctggaggtcggcatgaaggtctggtcgggggacggctggaacgagatcaaggaggtcattaacaatggggtgaagccggtcctgaagctcaagctgaagaccggcctggagatcaaggttacggaggagcacaagatcttcacaggcgaggggtggaaggaggccaaggacctcaaggttggcgataagctctacctgccggtgtcttaccccgagctggacttccccgtcaaggaggagaacgatttctacgagttcctcggctacttcctgggcgacgggtcactctccgttagcaaccacgtgtccctgcatgtcgggaatgacaaggagctcgcgctgtacttcaaggagaaggttgagaagtacgctggcgctgcttacctgatcgagagggacgggcagtacatcattgatgtgcatcgcaaggagttcgccgagaagatcaagaagattttcggcatcgagattaccgactcgaaggagaaggatatcccgtccagcctcctggcggtgaactccgaggctatgaaggctctcctgaggggcctcttctcggctgacgggtctgtctacgatgctaatggctctatcacagttgccctgtcgtctacttcatacccactcctgcggaaggtccagatcctcctgctctcactcggcattccttccacactgactggggagaaggaccaggatgtgaagatcattaagggcaacgagtacgagaccctcccaacgtaccgcctgatcattagcggggagagggcctcgctcttcttcaataagatcggcctgattggggagaagaagaagaagttcctggagctgatggcgggcaagaccacgtactccaccctcaacaatcacctgtaccaggagatcgtgagcattgagcccgctggcgaggaggaggtcttcgatattacagctccaccaaagtacacttggattaccaatggcattctctctctggattccattgtggggacagccacgttcgatcagtactggagcgtgcgcacctctaagcggacttcaggaacagtgaccgtgaccgatcacttccgcgcctgggcgaaccggggcctgaacctcggcacaatagaccaaattacattgtgcgtggagggttaccaaagctctggatcagccaacatcacccagaacaccttctctcagggctcttcttccggcagttcgggtggctcatccggctccacaacgactactcgcatcgagtgtgagaacatgtccttgtccggaccctacgttagcaggatcaccaatccctttaatggtattgcgctgtacgccaacggagacacagcccgcgctaccgttaacttccccgcaagtcgcaactacaatttccgcctgcggggttgcggcaacaacaataatcttgcccgtgtggacctgaggatcgacggacggaccgtcgggaccttttattaccagggcacatacccctgggaggccccaattgacaatgtttatgtcagtgcggggagtcatacagtcgaaatcactgttactgcggataacggcacatgggacgtgtatgccgactacctggtgatacagtgactcgagggggggcccggtacccaattcgccctatagtgagtcgtattacaattcactggccgtcgttttacaacgtcgtgactgggaaaaccctggcgttacccaacttaatcgccttgcagcacatccccctttcgccagctggcgtaatagcgaagaggcccgcaccgatcgcccttcccaacagttgcgcagcctgaatggcgaatggaaattgtaagcgttaatattttgttaaaattcgcgttaaatttttgttaaatcagctcattttttaaccaataggccgaaatcggcaaaatcccttataaatcaaaagaatagaccgagatagggttgagtgttgttccagtttggaacaagagtccactattaaagaacgtggactccaacgtcaaagggcgaaaaaccgtctatcagggcgatggcccactacgtgaaccatcaccctaatcaagttttttggggtcgaggtgccgtaaagcactaaatcggaaccctaaagggagcccccgatttagagcttgacggggaaagccggcgaacgtggcgagaaaggaagggaagaaagcgaaaggagcgggcgctagggcgctggcaagtgtagcggtcacgctgcgcgtaaccaccacacccgccgcgcttaatgcgccgctacagggcgcgtcaggtg

SEQ ID NO: 3015 - DNA, 4235 bp, Artificial Sequence
  Synthetic Construct, AS-15 intein modified protein encoding nucleic acids in pBluescript
gcacttttcggggaaatgtgcgcggaacccctatttgtttatttttctaaatacattcaaatatgtatccgctcatgagacaataaccctgataaatgcttcaataatattgaaaaaggaagagtatgagtattcaacatttccgtgtcgcccttattcccttttttgcggcattttgccttcctgtttttgctcacccagaaacgctggtgaaagtaaaagatgctgaagatcagttgggtgcacgagtgggttacatcgaactggatctcaacagcggtaagatccttgagagttttcgccccgaagaacgttttccaatgatgagcacttttaaagttctgctatgtggcgcggtattatcccgtattgacgccgggcaagagcaactcggtcgccgcatacactattctcagaatgacttggttgagtactcaccagtcacagaaaagcatcttacggatggcatgacagtaagagaattatgcagtgctgccataaccatgagtgataacactgcggccaacttacttctgacaacgatcggaggaccgaaggagctaaccgcttttttgcacaacatgggggatcatgtaactcgccttgatcgttgggaaccggagctgaatgaagccataccaaacgacgagcgtgacaccacgatgcctgtagcaatggcaacaacgttgcgcaaactattaactggcgaactacttactctagcttcccggcaacaattaatagactggatggaggcggataaagttgcaggaccacttctgcgctcggcccttccggctggctggtttattgctgataaatctggagccggtgagcgtgggtctcgcggtatcattgcagcactggggccagatggtaagccctcccgtatcgtagttatctacacgacggggagtcaggcaactatggatgaacgaaatagacagatcgctgagataggtgcctcactgattaagcattggtaactgtcagaccaagtttactcatatatactttagattgatttaaaacttcatttttaatttaaaaggatctaggtgaagatcctttttgataatctcatgaccaaaatcccttaacgtgagttttcgttccactgagcgtcagaccccgtagaaaagatcaaaggatcttcttgagatcctttttttctgcgcgtaatctgctgcttgcaaacaaaaaaaccaccgctaccagcggtggtttgtttgccggatcaagagctaccaactctttttccgaaggtaactggcttcagcagagcgcagataccaaatactgtccttctagtgtagccgtagttaggccaccacttcaagaactctgtagcaccgcctacatacctcgctctgctaatcctgttaccagtggctgctgccagtggcgataagtcgtgtcttaccgggttggactcaagacgatagttaccggataaggcgcagcggtcgggctgaacggggggttcgtgcacacagcccagcttggagcgaacgacctacaccgaactgagatacctacagcgtgagctatgagaaagcgccacgcttcccgaagggagaaaggcggacaggtatccggtaagcggcagggtcggaacaggagagcgcacgagggagcttccagggggaaacgcctggtatctttatagtcctgtcgggtttcgccacctctgacttgagcgtcgatttttgtgatgctcgtcaggggggcggagcctatggaaaaacgccagcaacgcggcctttttacggttcctggccttttgctggccttttgctcacatgttctttcctgcgttatcccctgattctgtggataaccgtattaccgcctttgagtgagctgataccgctcgccgcagccgaacgaccgagcgcagcgagtcagtgagcgaggaagcggaagagcgcccaatacgcaaaccgcctctccccgcgcgttggccgattcattaatgcagctggcacgacaggtttcccgactggaaagcgggcagtgagcgcaacgcaattaatgtgagttagctcactcattaggcaccccaggctttacactttatgcttccggctcgtatgttgtgtggaattgtgagcggataacaatttcacacaggaaacagcatatgcaaacaagcattactctgacatccaacgcatccggtacgtttgacggttactattacgaactctggaaggatactggcaatacaacaatgacggtctacactcaaggtcgcttttcctgccagtggtcgaacatcaataacgcgttgtttaggaccgggaagaaatacaaccagaattggcagtctcttggcacaatccggatcacgtactctgcgacttacaacccaaacgggaactcctacttgtgtatctatggctggtctaccaacccattggtcgagttctacatcgttgagtcctgggggaactggagaccgcctggtgccacgtccctgggccaagtgacaatcgatggcgggacctacgacatctataggacgacacgcgtcaaccagccttgcttcgtggcgggcactatgatcctgacagtcgcggggctggtcgctattgagaatattaaggcgggggacaaggtcatcgctactaacccggagacattcgaggtggctgagaagaccgtcctggagacctacgtgcgcgagaccacggagctcctgcacctgacgatcaatggcgacgtcattaagacaactttcgagcatctcttctacgccaaggatgtcgggttcgttgaggcgaaggagctgcaggtcggcgacaagctcctggattccaaggggaacgtgctcgtggtcgaggacaagaagatcaagattaccgatgagcccgttaaggtgtacaatttccaggttgatgacttccacacataccacgttgggtgcaatggggttctcgttcataattccattgtggggacagccacgttcgatcagtactggagcgtgcgcacctctaagcggacttcaggaacagtgaccgtgaccgatcacttccgcgcctgggcgaaccggggcctgaacctcggcacaatagaccaaattacattgtgcgtggagggttaccaaagctctggatcagccaacatcacccagaacaccttctctcagggctcttcttccggcagttcgggtggctcatccggctccacaacgactactcgcatcgagtgtgagaacatgtccttgtccggaccctacgttagcaggatcaccaatccctttaatggtattgcgctgtacgccaacggagacacagcccgcgctaccgttaacttccccgcaagtcgcaactacaatttccgcctgcggggttgcggcaacaacaataatcttgcccgtgtggacctgaggatcgacggacggaccgtcgggaccttttattaccagggcacatacccctgggaggccccaattgacaatgtttatgtcagtgcggggagtcatacagtcgaaatcactgttactgcggataacggcacatgggacgtgtatgccgactacctggtgatacagtgactcgagggggggcccggtacccaattcgccctatagtgagtcgtattacaattcactggccgtcgttttacaacgtcgtgactgggaaaaccctggcgttacccaacttaatcgccttgcagcacatccccctttcgccagctggcgtaatagcgaagaggcccgcaccgatcgcccttcccaacagttgcgcagcctgaatggcgaatggaaattgtaagcgttaatattttgttaaaattcgcgttaaatttttgttaaatcagctcattttttaaccaataggccgaaatcggcaaaatcccttataaatcaaaagaatagaccgagatagggttgagtgttgttccagtttggaacaagagtccactattaaagaacgtggactccaacgtcaaagggcgaaaaaccgtctatcagggcgatggcccactacgtgaaccatcaccctaatcaagttttttggggtcgaggtgccgtaaagcactaaatcggaaccctaaagggagcccccgatttagagcttgacggggaaagccggcgaacgtggcgagaaaggaagggaagaaagcgaaaggagcgggcgctagggcgctggcaagtgtagcggtcacgctgcgcgtaaccaccacacccgccgcgcttaatgcgccgctacagggcgcgtcaggtg

SEQ ID NO: 3016 - DNA, 4829 bp, Artificial Sequence
  Synthetic Construct, AS-16 intein modified protein encoding nucleic acids in pBluescript
gcacttttcggggaaatgtgcgcggaacccctatttgtttatttttctaaatacattcaaatatgtatccgctcatgagacaataaccctgataaatgcttcaataatattgaaaaaggaagagtatgagtattcaacatttccgtgtcgcccttattcccttttttgcggcattttgccttcctgtttttgctcacccagaaacgctggtgaaagtaaaagatgctgaagatcagttgggtgcacgagtgggttacatcgaactggatctcaacagcggtaagatccttgagagttttcgccccgaagaacgttttccaatgatgagcacttttaaagttctgctatgtggcgcggtattatcccgtattgacgccgggcaagagcaactcggtcgccgcatacactattctcagaatgacttggttgagtactcaccagtcacagaaaagcatcttacggatggcatgacagtaagagaattatgcagtgctgccataaccatgagtgataacactgcggccaacttacttctgacaacgatcggaggaccgaaggagctaaccgcttttttgcacaacatgggggatcatgtaactcgccttgatcgttgggaaccggagctgaatgaagccataccaaacgacgagcgtgacaccacgatgcctgtagcaatggcaacaacgttgcgcaaactattaactggcgaactacttactctagcttcccggcaacaattaatagactggatggaggcggataaagttgcaggaccacttctgcgctcggcccttccggctggctggtttattgctgataaatctggagccggtgagcgtgggtctcgcggtatcattgcagcactggggccagatggtaagccctcccgtatcgtagttatctacacgacggggagtcaggcaactatggatgaacgaaatagacagatcgctgagataggtgcctcactgattaagcattggtaactgtcagaccaagtttactcatatatactttagattgatttaaaacttcatttttaatttaaaaggatctaggtgaagatcctttttgataatctcatgaccaaaatcccttaacgtgagttttcgttccactgagcgtcagaccccgtagaaaagatcaaaggatcttcttgagatcctttttttctgcgcgtaatctgctgcttgcaaacaaaaaaaccaccgctaccagcggtggtttgtttgccggatcaagagctaccaactctttttccgaaggtaactggcttcagcagagcgcagataccaaatactgtccttctagtgtagccgtagttaggccaccacttcaagaactctgtagcaccgcctacatacctcgctctgctaatcctgttaccagtggctgctgccagtggcgataagtcgtgtcttaccgggttggactcaagacgatagttaccggataaggcgcagcggtcgggctgaacggggggttcgtgcacacagcccagcttggagcgaacgacctacaccgaactgagatacctacagcgtgagctatgagaaagcgccacgcttcccgaagggagaaaggcggacaggtatccggtaagcggcagggtcggaacaggagagcgcacgagggagcttccagggggaaacgcctggtatctttatagtcctgtcgggtttcgccacctctgacttgagcgtcgatttttgtgatgctcgtcaggggggcggagcctatggaaaaacgccagcaacgcggcctttttacggttcctggccttttgctggccttttgctcacatgttctttcctgcgttatcccctgattctgtggataaccgtattaccgcctttgagtgagctgataccgctcgccgcagccgaacgaccgagcgcagcgagtcagtgagcgaggaagcggaagagcgcccaatacgcaaaccgcctctccccgcgcgttggccgattcattaatgcagctggcacgacaggtttcccgactggaaagcgggcagtgagcgcaacgcaattaatgtgagttagctcactcattaggcaccccaggctttacactttatgcttccggctcgtatgttgtgtggaattgtgagcggataacaatttcacacaggaaacagcatatgcaaacaagcattactctgacatccaacgcatccggtacgtttgacggttactattacgaactctggaaggatactggcaatacaacaatgacggtctacactcaaggtcgcttttcctgccagtggtcgaacatcaataacgcgttgtttaggaccgggaagaaatacaaccagaattggcagtctcttggcacaatccggatcacgtactctgcgacttacaacccaaacgggaactcctacttgtgtatctatggctggtctaccaacccattggtcgagttctacatcgttgagtcctgggggaactggagaccgcctggtgccacgtccctgggccaagtgacaatcgatggcgggacctacgacatctataggacgacacgcgtcaaccagcctcagctggctctggacactcctattcctacgcctgacgggtggacaactatgggggagatcaaggcgggggacaaggttatcgatgagaagggcaggccgtgcaatgtggtcgctatctccgagattgacgatacagagcaggcctacaagatcaacttccgggacggcactagcattgtcgccggggagcgccacctctggaaggttcaggtgaccaacaatggcaggagggagaagctcctgaccacgggggagatgtaccagaagcagttcaagaccaagtcgaaggagaatcgcgcgctcttcaggatcccaattgccgacgcgttcatcctccctgagaacaagctgccgattgatccctacctgttcggctactggatcggcaacgggaatgctgtgaagccggagatcacagtcatgcgcgacgatgtcgacgaggttatcaagaacattccctacaagctccataataggtacaagcaggagggcaactcagacatcctggtttacaaggagctcaagtccattctggtgaagaacttcagggagaagcggatcccaattgagtacctcagggcttctgctcagcagcggaagcgcctcctgcagggcctgatcgactcagatgggtgcgtctccacagccaagagccaggcgatctacgttactattctcttcgagctggccaaggacgtgcaggatctcctgtggagcctcggcatcaagaacacactgaagactgctccatcggctcgctacggcatcgagaccggggagatctgctacctcattaagttcacggcgttcaatgacctggaggtgagcggcctcgataggaagctgaagagggggcgggagcgcaacatcaagacccggtcgcacttccattacatcaagtctattgagaagaccggcaagacgaagatgcgctgcatccaggttgattctccaagcaggctctacctcgctggcaagtctatgattccaacacataactccattgtggggacagccacgttcgatcagtactggagcgtgcgcacctctaagcggacttcaggaacagtgaccgtgaccgatcacttccgcgcctgggcgaaccggggcctgaacctcggcacaatagaccaaattacattgtgcgtggagggttaccaaagctctggatcagccaacatcacccagaacaccttctctcagggctcttcttccggcagttcgggtggctcatccggctccacaacgactactcgcatcgagtgtgagaacatgtccttgtccggaccctacgttagcaggatcaccaatccctttaatggtattgcgctgtacgccaacggagacacagcccgcgctaccgttaacttccccgcaagtcgcaactacaatttccgcctgcggggttgcggcaacaacaataatcttgcccgtgtggacctgaggatcgacggacggaccgtcgggaccttttattaccagggcacatacccctgggaggccccaattgacaatgtttatgtcagtgcggggagtcatacagtcgaaatcactgttactgcggataacggcacatgggacgtgtatgccgactacctggtgatacagtgactcgagggggggcccggtacccaattcgccctatagtgagtcgtattacaattcactggccgtcgttttacaacgtcgtgactgggaaaaccctggcgttacccaacttaatcgccttgcagcacatccccctttcgccagctggcgtaatagcgaagaggcccgcaccgatcgcccttcccaacagttgcgcagcctgaatggcgaatggaaattgtaagcgttaatattttgttaaaattcgcgttaaatttttgttaaatcagctcattttttaaccaataggccgaaatcggcaaaatcccttataaatcaaaagaatagaccgagatagggttgagtgttgttccagtttggaacaagagtccactattaaagaacgtggactccaacgtcaaagggcgaaaaaccgtctatcagggcgatggcccactacgtgaaccatcaccctaatcaagttttttggggtcgaggtgccgtaaagcactaaatcggaaccctaaagggagcccccgatttagagcttgacggggaaagccggcgaacgtggcgagaaaggaagggaagaaagcgaaaggagcgggcgctagggcgctggcaagtgtagcggtcacgctgcgcgtaaccaccacacccgccgcgcttaatgcgccgctacagggcgcgtcaggtg

SEQ ID NO: 3017 - DNA, 4838 bp, Artificial Sequence
  Synthetic Construct, AS-17 intein modified protein encoding nucleic acids in pBluescript
gcacttttcggggaaatgtgcgcggaacccctatttgtttatttttctaaatacattcaaatatgtatccgctcatgagacaataaccctgataaatgcttcaataatattgaaaaaggaagagtatgagtattcaacatttccgtgtcgcccttattcccttttttgcggcattttgccttcctgtttttgctcacccagaaacgctggtgaaagtaaaagatgctgaagatcagttgggtgcacgagtgggttacatcgaactggatctcaacagcggtaagatccttgagagttttcgccccgaagaacgttttccaatgatgagcacttttaaagttctgctatgtggcgcggtattatcccgtattgacgccgggcaagagcaactcggtcgccgcatacactattctcagaatgacttggttgagtactcaccagtcacagaaaagcatcttacggatggcatgacagtaagagaattatgcagtgctgccataaccatgagtgataacactgcggccaacttacttctgacaacgatcggaggaccgaaggagctaaccgcttttttgcacaacatgggggatcatgtaactcgccttgatcgttgggaaccggagctgaatgaagccataccaaacgacgagcgtgacaccacgatgcctgtagcaatggcaacaacgttgcgcaaactattaactggcgaactacttactctagcttcccggcaacaattaatagactggatggaggcggataaagttgcaggaccacttctgcgctcggcccttccggctggctggtttattgctgataaatctggagccggtgagcgtgggtctcgcggtatcattgcagcactggggccagatggtaagccctcccgtatcgtagttatctacacgacggggagtcaggcaactatggatgaacgaaatagacagatcgctgagataggtgcctcactgattaagcattggtaactgtcagaccaagtttactcatatatactttagattgatttaaaacttcatttttaatttaaaaggatctaggtgaagatcctttttgataatctcatgaccaaaatcccttaacgtgagttttcgttccactgagcgtcagaccccgtagaaaagatcaaaggatcttcttgagatcctttttttctgcgcgtaatctgctgcttgcaaacaaaaaaaccaccgctaccagcggtggtttgtttgccggatcaagagctaccaactctttttccgaaggtaactggcttcagcagagcgcagataccaaatactgtccttctagtgtagccgtagttaggccaccacttcaagaactctgtagcaccgcctacatacctcgctctgctaatcctgttaccagtggctgctgccagtggcgataagtcgtgtcttaccgggttggactcaagacgatagttaccggataaggcgcagcggtcgggctgaacggggggttcgtgcacacagcccagcttggagcgaacgacctacaccgaactgagatacctacagcgtgagctatgagaaagcgccacgcttcccgaagggagaaaggcggacaggtatccggtaagcggcagggtcggaacaggagagcgcacgagggagcttccagggggaaacgcctggtatctttatagtcctgtcgggtttcgccacctctgacttgagcgtcgatttttgtgatgctcgtcaggggggcggagcctatggaaaaacgccagcaacgcggcctttttacggttcctggccttttgctggccttttgctcacatgttctttcctgcgttatcccctgattctgtggataaccgtattaccgcctttgagtgagctgataccgctcgccgcagccgaacgaccgagcgcagcgagtcagtgagcgaggaagcggaagagcgcccaatacgcaaaccgcctctccccgcgcgttggccgattcattaatgcagctggcacgacaggtttcccgactggaaagcgggcagtgagcgcaacgcaattaatgtgagttagctcactcattaggcaccccaggctttacactttatgcttccggctcgtatgttgtgtggaattgtgagcggataacaatttcacacaggaaacagcatatgcaaacaagcattactctgacatccaacgcatccggtacgtttgacggttactattacgaactctggaaggatactggcaatacaacaatgacggtctacactcaaggtcgcttttcctgccagtggtcgaacatcaataacgcgttgtttaggaccgggaagaaatacaaccagaattggcagtctcttggcacaatccggatcacgtactctgcgacttacaacccaaacgggaactcctacttgtgtatctatggctggtctaccaacccattggtcgagttctacatcgttgagtcctgggggaactggagaccgcctggtgccacgtccctgggccaagtgacaatcgatggcgggacctacgacatctataggacgacacgcgtcaaccagccttgcgtggcgggggacactaagattctcacatcatcgggctaccatcccatcaaggacatggagggcaagcaggttcgggtttggaatggctacgagttctcggagacaatcgttcacaagactggggtgaaccagaagctcattatggtgtctctggacgatggcaccgagctcaggtgcacgccgtaccataagttctacatcgagaccgggtcgcggccagctgacaagtctcgggtcatggaggttcgcgctggcgacctggagaagggggaccgcatcattaggttcgagctgccgacaatcactgtcggcgagaccacgatgagcgacaaggaggcctacacaaagggcttcttctctgcggatgggtgcgtcattaagtcaaagtacggcgaggatgagtacaggatctcggttaagcgggaggacaagattgaggctctgacgaagtatgtggatgtgatcaagtcccacacaaaccggttccgcactcatttctacgtgccagactacgtccagaataagttcgaggtccctatcaactcaatggttaatgagaagatttcctggctcgccggcttcatggacggcgatgggtgcgttatccgctacaaggacattgagaacatgcaggcggtgtccatcaataagagcttcctgcaggatattaggctcatgctgcagaccatcggcattcactccacgatcaacaagttcatgccgaatcgcgtgatgaagatgcccgatggcaggggcgggaccgacatgtacaacggggctgagagctggaggctccagatcgactcggagggcgtccgcaagctcttcgctctggggttcacgccgcgcaggctgaagatgaacggctccaggaagcggcaccataagaccaataagttcacgcgcgtggtcagcgtgacagaccatggcgatgtcgaggacacttactgcttcaatgagccaaagaggcacatgggggtcttcaacggggtcattacggggcagtccattgtggggacagccacgttcgatcagtactggagcgtgcgcacctctaagcggacttcaggaacagtgaccgtgaccgatcacttccgcgcctgggcgaaccggggcctgaacctcggcacaatagaccaaattacattgtgcgtggagggttaccaaagctctggatcagccaacatcacccagaacaccttctctcagggctcttcttccggcagttcgggtggctcatccggctccacaacgactactcgcatcgagtgtgagaacatgtccttgtccggaccctacgttagcaggatcaccaatccctttaatggtattgcgctgtacgccaacggagacacagcccgcgctaccgttaacttccccgcaagtcgcaactacaatttccgcctgcggggttgcggcaacaacaataatcttgcccgtgtggacctgaggatcgacggacggaccgtcgggaccttttattaccagggcacatacccctgggaggccccaattgacaatgtttatgtcagtgcggggagtcatacagtcgaaatcactgttactgcggataacggcacatgggacgtgtatgccgactacctggtgatacagtgactcgagggggggcccggtacccaattcgccctatagtgagtcgtattacaattcactggccgtcgttttacaacgtcgtgactgggaaaaccctggcgttacccaacttaatcgccttgcagcacatccccctttcgccagctggcgtaatagcgaagaggcccgcaccgatcgcccttcccaacagttgcgcagcctgaatggcgaatggaaattgtaagcgttaatattttgttaaaattcgcgttaaatttttgttaaatcagctcattttttaaccaataggccgaaatcggcaaaatcccttataaatcaaaagaatagaccgagatagggttgagtgttgttccagtttggaacaagagtccactattaaagaacgtggactccaacgtcaaagggcgaaaaaccgtctatcagggcgatggcccactacgtgaaccatcaccctaatcaagttttttggggtcgaggtgccgtaaagcactaaatcggaaccctaaagggagcccccgatttagagcttgacggggaaagccggcgaacgtggcgagaaaggaagggaagaaagcgaaaggagcgggcgctagggcgctggcaagtgtagcggtcacgctgcgcgtaaccaccacacccgccgcgcttaatgcgccgctacagggcgcgtcaggtg

SEQ ID NO: 3018 - DNA, 5012 bp, Artificial Sequence
  Synthetic Construct, AS-18 intein modified protein encoding nucleic acids in pBluescript
gcacttttcggggaaatgtgcgcggaacccctatttgtttatttttctaaatacattcaaatatgtatccgctcatgagacaataaccctgataaatgcttcaataatattgaaaaaggaagagtatgagtattcaacatttccgtgtcgcccttattcccttttttgcggcattttgccttcctgtttttgctcacccagaaacgctggtgaaagtaaaagatgctgaagatcagttgggtgcacgagtgggttacatcgaactggatctcaacagcggtaagatccttgagagttttcgccccgaagaacgttttccaatgatgagcacttttaaagttctgctatgtggcgcggtattatcccgtattgacgccgggcaagagcaactcggtcgccgcatacactattctcagaatgacttggttgagtactcaccagtcacagaaaagcatcttacggatggcatgacagtaagagaattatgcagtgctgccataaccatgagtgataacactgcggccaacttacttctgacaacgatcggaggaccgaaggagctaaccgcttttttgcacaacatgggggatcatgtaactcgccttgatcgttgggaaccggagctgaatgaagccataccaaacgacgagcgtgacaccacgatgcctgtagcaatggcaacaacgttgcgcaaactattaactggcgaactacttactctagcttcccggcaacaattaatagactggatggaggcggataaagttgcaggaccacttctgcgctcggcccttccggctggctggtttattgctgataaatctggagccggtgagcgtgggtctcgcggtatcattgcagcactggggccagatggtaagccctcccgtatcgtagttatctacacgacggggagtcaggcaactatggatgaacgaaatagacagatcgctgagataggtgcctcactgattaagcattggtaactgtcagaccaagtttactcatatatactttagattgatttaaaacttcatttttaatttaaaaggatctaggtgaagatcctttttgataatctcatgaccaaaatcccttaacgtgagttttcgttccactgagcgtcagaccccgtagaaaagatcaaaggatcttcttgagatcctttttttctgcgcgtaatctgctgcttgcaaacaaaaaaaccaccgctaccagcggtggtttgtttgccggatcaagagctaccaactctttttccgaaggtaactggcttcagcagagcgcagataccaaatactgtccttctagtgtagccgtagttaggccaccacttcaagaactctgtagcaccgcctacatacctcgctctgctaatcctgttaccagtggctgctgccagtggcgataagtcgtgtcttaccgggttggactcaagacgatagttaccggataaggcgcagcggtcgggctgaacggggggttcgtgcacacagcccagcttggagcgaacgacctacaccgaactgagatacctacagcgtgagctatgagaaagcgccacgcttcccgaagggagaaaggcggacaggtatccggtaagcggcagggtcggaacaggagagcgcacgagggagcttccagggggaaacgcctggtatctttatagtcctgtcgggtttcgccacctctgacttgagcgtcgatttttgtgatgctcgtcaggggggcggagcctatggaaaaacgccagcaacgcggcctttttacggttcctggccttttgctggccttttgctcacatgttctttcctgcgttatcccctgattctgtggataaccgtattaccgcctttgagtgagctgataccgctcgccgcagccgaacgaccgagcgcagcgagtcagtgagcgaggaagcggaagagcgcccaatacgcaaaccgcctctccccgcgcgttggccgattcattaatgcagctggcacgacaggtttcccgactggaaagcgggcagtgagcgcaacgcaattaatgtgagttagctcactcattaggcaccccaggctttacactttatgcttccggctcgtatgttgtgtggaattgtgagcggataacaatttcacacaggaaacagcatatgcaaacaagcattactctgacatccaacgcatccggtacgtttgacggttactattacgaactctggaaggatactggcaatacaacaatgacggtctacactcaaggtcgcttttcctgccagtggtcgaacatcaataacgcgttgtttaggaccgggaagaaatacaaccagaattggcagtctcttggcacaatccggatcacgtactctgcgacttacaacccaaacgggaactcctacttgtgtatctatggctggtctaccaacccattggtcgagttctacatcgttgagtcctgggggaactggagaccgcctggtgccacgtccctgggccaagtgacaatcgatggcgggacctacgacatctataggacgacacgcgtcaaccagccttgcttcgatggcaagacaaagattctcacaaatcaggggttcatgacgctgcggcaggtttacgagcagggctacgaggggctctcaacgctgtcactcaacaccaagacgcacaagatcgagtggaagccaattctggacaccatgaagcgccagtccgagatgatcgatatttccgttagccagactggcaggatcaccgacaacacgctgcggctcacccctgatcataagatggtcaatctcaggggcgggaagtacacaaagactgagatccaggacctcctgaagcagcaggagatgctgactgtggcccagaccatcccgagcctcggcaacaataagcaccaggaggcggacctggcttacttcctcggcgggatcattacggatggctcgatctacacatccagcactcggggggaggtccagttcatccagaaggacgttccggagaagcaggctttcatttcgaagatgaacgatctggccaattcgctctacggcaagtctttcacggcgcacatcaagcccgtgtcgtcttcatacattaggggccagaaggtcacggggcaggctacagcgtacaggctgcattccaaggctatcgcctacgacgtcaaggagcgcgagaacaatattacacagctcctgctggagaacgaggctgagctgtcttaccatttcctcggcggcgtgatcgacggcgatgggtgctaccacaagaacaggctccatatctacatttcagaggagaatctgctccaggccgtcatcattgcgtgcctgaagatgaatactgtgccgcaggtcaccaagaaccggaatatctaccacctccagattgtggagaagctggaggtcatcctccggtacacccagcgcgtcaagggcgaggttacccccaggacgatccagacacggttcttcgcgacgcgccagctgttcgagaaccaggagacaggccagatcaagctccggcaggacaacaattgcctgatttctgataagcagctccgcgagatgggcgagttcgaggagctgatcgacggggatactcgcatgcagagggttattcaagtgggcgagaagagcgacggggatgtttacaacatcaccgtggcggagcatcataactacgtcgttttcacagccaagtacacaccagtcgtcgtttgcaactccattgtggggacagccacgttcgatcagtactggagcgtgcgcacctctaagcggacttcaggaacagtgaccgtgaccgatcacttccgcgcctgggcgaaccggggcctgaacctcggcacaatagaccaaattacattgtgcgtggagggttaccaaagctctggatcagccaacatcacccagaacaccttctctcagggctcttcttccggcagttcgggtggctcatccggctccacaacgactactcgcatcgagtgtgagaacatgtccttgtccggaccctacgttagcaggatcaccaatccctttaatggtattgcgctgtacgccaacggagacacagcccgcgctaccgttaacttccccgcaagtcgcaactacaatttccgcctgcggggttgcggcaacaacaataatcttgcccgtgtggacctgaggatcgacggacggaccgtcgggaccttttattaccagggcacatacccctgggaggccccaattgacaatgtttatgtcagtgcggggagtcatacagtcgaaatcactgttactgcggataacggcacatgggacgtgtatgccgactacctggtgatacagtgactcgagggggggcccggtacccaattcgccctatagtgagtcgtattacaattcactggccgtcgttttacaacgtcgtgactgggaaaaccctggcgttacccaacttaatcgccttgcagcacatccccctttcgccagctggcgtaatagcgaagaggcccgcaccgatcgcccttcccaacagttgcgcagcctgaatggcgaatggaaattgtaagcgttaatattttgttaaaattcgcgttaaatttttgttaaatcagctcattttttaaccaataggccgaaatcggcaaaatcccttataaatcaaaagaatagaccgagatagggttgagtgttgttccagtttggaacaagagtccactattaaagaacgtggactccaacgtcaaagggcgaaaaaccgtctatcagggcgatggcccactacgtgaaccatcaccctaatcaagttttttggggtcgaggtgccgtaaagcactaaatcggaaccctaaagggagcccccgatttagagcttgacggggaaagccggcgaacgtggcgagaaaggaagggaagaaagcgaaaggagcgggcgctagggcgctggcaagtgtagcggtcacgctgcgcgtaaccaccacacccgccgcgcttaatgcgccgctacagggcgcgtcaggtg

SEQ ID NO: 3019 - DNA, 4871 bp, Artificial Sequence
  Synthetic Construct, AS-19 intein modified protein encoding nucleic acids in pBluescript
gcacttttcggggaaatgtgcgcggaacccctatttgtttatttttctaaatacattcaaatatgtatccgctcatgagacaataaccctgataaatgcttcaataatattgaaaaaggaagagtatgagtattcaacatttccgtgtcgcccttattcccttttttgcggcattttgccttcctgtttttgctcacccagaaacgctggtgaaagtaaaagatgctgaagatcagttgggtgcacgagtgggttacatcgaactggatctcaacagcggtaagatccttgagagttttcgccccgaagaacgttttccaatgatgagcacttttaaagttctgctatgtggcgcggtattatcccgtattgacgccgggcaagagcaactcggtcgccgcatacactattctcagaatgacttggttgagtactcaccagtcacagaaaagcatcttacggatggcatgacagtaagagaattatgcagtgctgccataaccatgagtgataacactgcggccaacttacttctgacaacgatcggaggaccgaaggagctaaccgcttttttgcacaacatgggggatcatgtaactcgccttgatcgttgggaaccggagctgaatgaagccataccaaacgacgagcgtgacaccacgatgcctgtagcaatggcaacaacgttgcgcaaactattaactggcgaactacttactctagcttcccggcaacaattaatagactggatggaggcggataaagttgcaggaccacttctgcgctcggcccttccggctggctggtttattgctgataaatctggagccggtgagcgtgggtctcgcggtatcattgcagcactggggccagatggtaagccctcccgtatcgtagttatctacacgacggggagtcaggcaactatggatgaacgaaatagacagatcgctgagataggtgcctcactgattaagcattggtaactgtcagaccaagtttactcatatatactttagattgatttaaaacttcatttttaatttaaaaggatctaggtgaagatcctttttgataatctcatgaccaaaatcccttaacgtgagttttcgttccactgagcgtcagaccccgtagaaaagatcaaaggatcttcttgagatcctttttttctgcgcgtaatctgctgcttgcaaacaaaaaaaccaccgctaccagcggtggtttgtttgccggatcaagagctaccaactctttttccgaaggtaactggcttcagcagagcgcagataccaaatactgtccttctagtgtagccgtagttaggccaccacttcaagaactctgtagcaccgcctacatacctcgctctgctaatcctgttaccagtggctgctgccagtggcgataagtcgtgtcttaccgggttggactcaagacgatagttaccggataaggcgcagcggtcgggctgaacggggggttcgtgcacacagcccagcttggagcgaacgacctacaccgaactgagatacctacagcgtgagctatgagaaagcgccacgcttcccgaagggagaaaggcggacaggtatccggtaagcggcagggtcggaacaggagagcgcacgagggagcttccagggggaaacgcctggtatctttatagtcctgtcgggtttcgccacctctgacttgagcgtcgatttttgtgatgctcgtcaggggggcggagcctatggaaaaacgccagcaacgcggcctttttacggttcctggccttttgctggccttttgctcacatgttctttcctgcgttatcccctgattctgtggataaccgtattaccgcctttgagtgagctgataccgctcgccgcagccgaacgaccgagcgcagcgagtcagtgagcgaggaagcggaagagcgcccaatacgcaaaccgcctctccccgcgcgttggccgattcattaatgcagctggcacgacaggtttcccgactggaaagcgggcagtgagcgcaacgcaattaatgtgagttagctcactcattaggcaccccaggctttacactttatgcttccggctcgtatgttgtgtggaattgtgagcggataacaatttcacacaggaaacagcatatgcaaacaagcattactctgacatccaacgcatccggtacgtttgacggttactattacgaactctggaaggatactggcaatacaacaatgacggtctacactcaaggtcgcttttcctgccagtggtcgaacatcaataacgcgttgtttaggaccgggaagaaatacaaccagaattggcagtctcttggcacaatccggatcacgtactctgcgacttacaacccaaacgggaactcctacttgtgtatctatggctggtctaccaacccattggtcgagttctacatcgttgagtcctgggggaactggagaccgcctggtgccacgtccctgggccaagtgacaatcgatggcgggacctacgacatctataggacgacacgcgtcaaccagccttgcgtcgcgccggagacaaagatcctcacagacagggggcagatcgccatcgctgacgtcgcgggggagaaggtcaatatttggaacgggtcggagtggtctgaggttctcgtgaagaagacaggcgagaaccagccgctcctgaaggtgcacttctcaaatggcgagtccctggactgcacttactaccacaagttccatgtccaggagaactacaaggggaaggtcaagatcgttgaggctaaggacctccaggagggcgataagctgattaagtaccggctcccactggtggagtccgagaatgacatcgatttcccttacgcctacaccagcggcttcttctcgggcgacgggtctcatgatggcatggggaagccggagattgacctctacggcgagaagaaggagctcctgcccttcgtcacggttaggaacaagtactacggcgggtcatacggcgacaagtcctggcgcatcgagagggatgaggtggccgtctacgacgatgttaaccaggaccggatcgtgtgcaagctcccgctggatattcccgcgaagttcacagttcccgtgaatggctacactatccagagcaggctggagtggctggctggcctcctggacgcggatgggacagtcgctaggaacggcgacaatgagagcctgcaggttgcgtcgacccaccagcagttcctcctggacatccgcctcatgctgcagacgctcggcgtcgactctaaggtggtcaagatggatgagatggggtacaggtcgctgccagacggcaagggcgggtaccaggattacttctgccaggcgaagtaccgcctcctgatttccagcaacggcctcttccagctgggcgagctcgggctgaagaccaacaggctccagtggaatctgagggagcctcagagggaggcttcccagttcatcagggtggagaaggtcgagctcacctgccggtacgacgatacgtactgcttctcagagccaaagaggcatctcggcatgttcaatggcatcctcacagggcagtccattgtggggacagccacgttcgatcagtactggagcgtgcgcacctctaagcggacttcaggaacagtgaccgtgaccgatcacttccgcgcctgggcgaaccggggcctgaacctcggcacaatagaccaaattacattgtgcgtggagggttaccaaagctctggatcagccaacatcacccagaacaccttctctcagggctcttcttccggcagttcgggtggctcatccggctccacaacgactactcgcatcgagtgtgagaacatgtccttgtccggaccctacgttagcaggatcaccaatccctttaatggtattgcgctgtacgccaacggagacacagcccgcgctaccgttaacttccccgcaagtcgcaactacaatttccgcctgcggggttgcggcaacaacaataatcttgcccgtgtggacctgaggatcgacggacggaccgtcgggaccttttattaccagggcacatacccctgggaggccccaattgacaatgtttatgtcagtgcggggagtcatacagtcgaaatcactgttactgcggataacggcacatgggacgtgtatgccgactacctggtgatacagtgactcgagggggggcccggtacccaattcgccctatagtgagtcgtattacaattcactggccgtcgttttacaacgtcgtgactgggaaaaccctggcgttacccaacttaatcgccttgcagcacatccccctttcgccagctggcgtaatagcgaagaggcccgcaccgatcgcccttcccaacagttgcgcagcctgaatggcgaatggaaattgtaagcgttaatattttgttaaaattcgcgttaaatttttgttaaatcagctcattttttaaccaataggccgaaatcggcaaaatcccttataaatcaaaagaatagaccgagatagggttgagtgttgttccagtttggaacaagagtccactattaaagaacgtggactccaacgtcaaagggcgaaaaaccgtctatcagggcgatggcccactacgtgaaccatcaccctaatcaagttttttggggtcgaggtgccgtaaagcactaaatcggaaccctaaagggagcccccgatttagagcttgacggggaaagccggcgaacgtggcgagaaaggaagggaagaaagcgaaaggagcgggcgctagggcgctggcaagtgtagcggtcacgctgcgcgtaaccaccacacccgccgcgcttaatgcgccgctacagggcgcgtcaggtg

SEQ ID NO: 3020 - DNA, 5651 bp, Artificial Sequence
  Synthetic Construct, AS-20 intein modified protein encoding nucleic acids in pBluescript
gcacttttcggggaaatgtgcgcggaacccctatttgtttatttttctaaatacattcaaatatgtatccgctcatgagacaataaccctgataaatgcttcaataatattgaaaaaggaagagtatgagtattcaacatttccgtgtcgcccttattcccttttttgcggcattttgccttcctgtttttgctcacccagaaacgctggtgaaagtaaaagatgctgaagatcagttgggtgcacgagtgggttacatcgaactggatctcaacagcggtaagatccttgagagttttcgccccgaagaacgttttccaatgatgagcacttttaaagttctgctatgtggcgcggtattatcccgtattgacgccgggcaagagcaactcggtcgccgcatacactattctcagaatgacttggttgagtactcaccagtcacagaaaagcatcttacggatggcatgacagtaagagaattatgcagtgctgccataaccatgagtgataacactgcggccaacttacttctgacaacgatcggaggaccgaaggagctaaccgcttttttgcacaacatgggggatcatgtaactcgccttgatcgttgggaaccggagctgaatgaagccataccaaacgacgagcgtgacaccacgatgcctgtagcaatggcaacaacgttgcgcaaactattaactggcgaactacttactctagcttcccggcaacaattaatagactggatggaggcggataaagttgcaggaccacttctgcgctcggcccttccggctggctggtttattgctgataaatctggagccggtgagcgtgggtctcgcggtatcattgcagcactggggccagatggtaagccctcccgtatcgtagttatctacacgacggggagtcaggcaactatggatgaacgaaatagacagatcgctgagataggtgcctcactgattaagcattggtaactgtcagaccaagtttactcatatatactttagattgatttaaaacttcatttttaatttaaaaggatctaggtgaagatcctttttgataatctcatgaccaaaatcccttaacgtgagttttcgttccactgagcgtcagaccccgtagaaaagatcaaaggatcttcttgagatcctttttttctgcgcgtaatctgctgcttgcaaacaaaaaaaccaccgctaccagcggtggtttgtttgccggatcaagagctaccaactctttttccgaaggtaactggcttcagcagagcgcagataccaaatactgtccttctagtgtagccgtagttaggccaccacttcaagaactctgtagcaccgcctacatacctcgctctgctaatcctgttaccagtggctgctgccagtggcgataagtcgtgtcttaccgggttggactcaagacgatagttaccggataaggcgcagcggtcgggctgaacggggggttcgtgcacacagcccagcttggagcgaacgacctacaccgaactgagatacctacagcgtgagctatgagaaagcgccacgcttcccgaagggagaaaggcggacaggtatccggtaagcggcagggtcggaacaggagagcgcacgagggagcttccagggggaaacgcctggtatctttatagtcctgtcgggtttcgccacctctgacttgagcgtcgatttttgtgatgctcgtcaggggggcggagcctatggaaaaacgccagcaacgcggcctttttacggttcctggccttttgctggccttttgctcacatgttctttcctgcgttatcccctgattctgtggataaccgtattaccgcctttgagtgagctgataccgctcgccgcagccgaacgaccgagcgcagcgagtcagtgagcgaggaagcggaagagcgcccaatacgcaaaccgcctctccccgcgcgttggccgattcattaatgcagctggcacgacaggtttcccgactggaaagcgggcagtgagcgcaacgcaattaatgtgagttagctcactcattaggcaccccaggctttacactttatgcttccggctcgtatgttgtgtggaattgtgagcggataacaatttcacacaggaaacagcatatgcaaacaagcattactctgacatccaacgcatccggtacgtttgacggttactattacgaactctggaaggatactggcaatacaacaatgacggtctacactcaaggtcgcttttcctgccagtggtcgaacatcaataacgcgttgtttaggaccgggaagaaatacaaccagaattggcagtctcttggcacaatccggatcacgtactctgcgacttacaacccaaacgggaactcctacttgtgtatctatggctggtctaccaacccattggtcgagttctacatcgttgagtcctgggggaactggagaccgcctggtgccacgtccctgggccaagtgacaatcgatggcgggacctacgacatctataggacgacacgcgtcaaccagccttgcctcgcttcggacactctcgttcgcacatcggagggggacaagccagtcgctgaggtcgctatcggggactacctgctggacgctgaggacaagccagtcctctgcatgggcgctaacccttcccagaccgggcgcatgaaggagatcgcttaccaggacttcgattcgaagaagagggtgtctttcaagtgcacaccggaccaccacctggagctgacactcactgattccactccctccctcagcggcaagtcagtcacctggttctccaggtgcacgggggctcacctcagcgaggaggtgtcggaggtctacctggacaacatggtttcgatcttctacaatgatctggttgactcgacggattctgcggtggacaaggattccattcacgaggccgtggacctggcgctggaggatcactaccataggggcaactctgaccagtactcaatccatctcaatgagtacatcagccggattgccgataaggagctgcagaacgagccggagttcatccgggagtgcattcacgacgccgcgaatcgcttcgtcatcacctccagcggcaacaggaatattaagtcggagtctttcgacgataagctcctgctctcacgctccaggtcgtctacagctgacagcgattcggactacgtgatcactgacgcctccgtccactctcattcaaacaattcatccgtctacctcgcctcaccagactccatgatccctgatggcgctgccaaccgcttcgagaatattgcgtccaagctgaaggagccagtgtgcaactgcggcgggatccggaagattttccgcagcttcggcaccacggaggacgctgagctcgcttactccctgctcctgagcgagcactactacaggctggacccacggttcgtcacagatggctacactttccaggcctcggttgagcagtacgagaacatgtgctctcaggaggtgcagaatatgcacctgaagctctaccgctcacctctcaagttcgtggagagggagcataactccgctgagctgccagtcgacccatacttcctgggcctctggctgggcgatggggacagctcggggacaactatcatgaccacggatcgggagattgtggtctggctcaactcctacgtcgagcgcctgaaccagaataagccggagggctgcttccccctcaagctgaccgagcagctgatctacggcgctgggcacacgtccaagagcgggcatacaactaaggtcgacgttaggaattacaagatctcttcaggcgatgctttcgtgcggtcggggacatactggaacccgattttcgacggcctcaagaagctggggctcctgaacaataagagcgctggcatcccccaggagtacatgaactctgacgagcagaataggctctcagttattgccggcctgatggattccgacgggtgctacgtgaagagccacaacacctaccgcttcacccagctcacggaggaccataagaagatcgtctacgatctgaaggagctcgccctgagctgcggcattaacaccacgggggtcgagctctcggttaagccgctgggcttcaataagcacaagcattctaccgagtatgtggtgtacctcggcaacgggagccagaagttccaggagctcctgctcctgccacggaagaagatggagatcagcaagaagcacgtgtcgctggacgcgcgccctttcacggttagcgacgtggaggatggcgagttccgggctattgaggtttcagggggggttttccagctcgctaataggctcgtggttgctaattccattgtggggacagccacgttcgatcagtactggagcgtgcgcacctctaagcggacttcaggaacagtgaccgtgaccgatcacttccgcgcctgggcgaaccggggcctgaacctcggcacaatagaccaaattacattgtgcgtggagggttaccaaagctctggatcagccaacatcacccagaacaccttctctcagggctcttcttccggcagttcgggtggctcatccggctccacaacgactactcgcatcgagtgtgagaacatgtccttgtccggaccctacgttagcaggatcaccaatccctttaatggtattgcgctgtacgccaacggagacacagcccgcgctaccgttaacttccccgcaagtcgcaactacaatttccgcctgcggggttgcggcaacaacaataatcttgcccgtgtggacctgaggatcgacggacggaccgtcgggaccttttattaccagggcacatacccctgggaggccccaattgacaatgtttatgtcagtgcggggagtcatacagtcgaaatcactgttactgcggataacggcacatgggacgtgtatgccgactacctggtgatacagtgactcgagggggggcccggtacccaattcgccctatagtgagtcgtattacaattcactggccgtcgttttacaacgtcgtgactgggaaaaccctggcgttacccaacttaatcgccttgcagcacatccccctttcgccagctggcgtaatagcgaagaggcccgcaccgatcgcccttcccaacagttgcgcagcctgaatggcgaatggaaattgtaagcgttaatattttgttaaaattcgcgttaaatttttgttaaatcagctcattttttaaccaataggccgaaatcggcaaaatcccttataaatcaaaagaatagaccgagatagggttgagtgttgttccagtttggaacaagagtccactattaaagaacgtggactccaacgtcaaagggcgaaaaaccgtctatcagggcgatggcccactacgtgaaccatcaccctaatcaagttttttggggtcgaggtgccgtaaagcactaaatcggaaccctaaagggagcccccgatttagagcttgacggggaaagccggcgaacgtggcgagaaaggaagggaagaaagcgaaaggagcgggcgctagggcgctggcaagtgtagcggtcacgctgcgcgtaaccaccacacccgccgcgcttaatgcgccgctacagggcgcgtcaggtg

SEQ ID NO: 3021 - DNA, 4712 bp, Artificial Sequence
  Synthetic Construct, AS-21 intein modified protein encoding nucleic acids in pBluescript
gcacttttcggggaaatgtgcgcggaacccctatttgtttatttttctaaatacattcaaatatgtatccgctcatgagacaataaccctgataaatgcttcaataatattgaaaaaggaagagtatgagtattcaacatttccgtgtcgcccttattcccttttttgcggcattttgccttcctgtttttgctcacccagaaacgctggtgaaagtaaaagatgctgaagatcagttgggtgcacgagtgggttacatcgaactggatctcaacagcggtaagatccttgagagttttcgccccgaagaacgttttccaatgatgagcacttttaaagttctgctatgtggcgcggtattatcccgtattgacgccgggcaagagcaactcggtcgccgcatacactattctcagaatgacttggttgagtactcaccagtcacagaaaagcatcttacggatggcatgacagtaagagaattatgcagtgctgccataaccatgagtgataacactgcggccaacttacttctgacaacgatcggaggaccgaaggagctaaccgcttttttgcacaacatgggggatcatgtaactcgccttgatcgttgggaaccggagctgaatgaagccataccaaacgacgagcgtgacaccacgatgcctgtagcaatggcaacaacgttgcgcaaactattaactggcgaactacttactctagcttcccggcaacaattaatagactggatggaggcggataaagttgcaggaccacttctgcgctcggcccttccggctggctggtttattgctgataaatctggagccggtgagcgtgggtctcgcggtatcattgcagcactggggccagatggtaagccctcccgtatcgtagttatctacacgacggggagtcaggcaactatggatgaacgaaatagacagatcgctgagataggtgcctcactgattaagcattggtaactgtcagaccaagtttactcatatatactttagattgatttaaaacttcatttttaatttaaaaggatctaggtgaagatcctttttgataatctcatgaccaaaatcccttaacgtgagttttcgttccactgagcgtcagaccccgtagaaaagatcaaaggatcttcttgagatcctttttttctgcgcgtaatctgctgcttgcaaacaaaaaaaccaccgctaccagcggtggtttgtttgccggatcaagagctaccaactctttttccgaaggtaactggcttcagcagagcgcagataccaaatactgtccttctagtgtagccgtagttaggccaccacttcaagaactctgtagcaccgcctacatacctcgctctgctaatcctgttaccagtggctgctgccagtggcgataagtcgtgtcttaccgggttggactcaagacgatagttaccggataaggcgcagcggtcgggctgaacggggggttcgtgcacacagcccagcttggagcgaacgacctacaccgaactgagatacctacagcgtgagctatgagaaagcgccacgcttcccgaagggagaaaggcggacaggtatccggtaagcggcagggtcggaacaggagagcgcacgagggagcttccagggggaaacgcctggtatctttatagtcctgtcgggtttcgccacctctgacttgagcgtcgatttttgtgatgctcgtcaggggggcggagcctatggaaaaacgccagcaacgcggcctttttacggttcctggccttttgctggccttttgctcacatgttctttcctgcgttatcccctgattctgtggataaccgtattaccgcctttgagtgagctgataccgctcgccgcagccgaacgaccgagcgcagcgagtcagtgagcgaggaagcggaagagcgcccaatacgcaaaccgcctctccccgcgcgttggccgattcattaatgcagctggcacgacaggtttcccgactggaaagcgggcagtgagcgcaacgcaattaatgtgagttagctcactcattaggcaccccaggctttacactttatgcttccggctcgtatgttgtgtggaattgtgagcggataacaatttcacacaggaaacagcatatgcaaacaagcattactctgacatccaacgcatccggtacgtttgacggttactattacgaactctggaaggatactggcaatacaacaatgacggtctacactcaaggtcgcttttcctgccagtggtcgaacatcaataacgcgttgtttaggaccgggaagaaatacaaccagaattggcagtctcttggcacaatccggatcacgtactctgcgacttacaacccaaacgggaactcctacttgtgtatctatggctggtctaccaacccattggtcgagttctacatcgttgagtcctgggggaactggagaccgcctggtgccacgtccctgggccaagtgacaatcgatggcgggacctacgacatctataggacgacacgcgtcaaccagccttgccagccatacgacgctctcgtttcaacgccatcggggctcgttcctatcggggctctcgtggagacagacgcggtcggcatgaaggtgttcgatgcgcacggcctcacacaggtcattgctactaagagcaacggggttaaggacgtgctgaggatctggacccgcgcgggccacgctctcgacgtcacggccgatcatctggtttggaggtccacaagcgctggcgctggggctttcgtgccagctggcgctctcagggctggggacacactggagtggcataggactattgctccaggcgagggggagatcacgagccgcgagattgctgaggctgctctcgctggcaggctgcaggctgatggcttcgtcgggcgctacgctgggaccaatgcttcgctcacgatcgaggcgatgaccgttccaacgaggctctacgacgctccactgccagtggtcgctgcctacctcaggtcactgttccaggctgatggctacgtctcgcgcagggagaggtctaccctcatcggcctggacatgatttccgaggggctgatcaggggcgttcaggggctcctggctaggttcggcatcttcgccagggtgcggagggaggctgatccacgccctgacaggcacgatctctggtccctgggcattcagaacgctggggacaggcggaccttcgccgatgagatcggcttcctcgacccagtgaaggcggctaagctggaggcttccttcgaccagccaggccaggctgctaagcctgtcaagaggctccagatcgagaggattgagccgaggggcccgatgcccgtctacgacattcagacagattccggggagtacctctctgctgggctcagggttcataactccattgtggggacagccacgttcgatcagtactggagcgtgcgcacctctaagcggacttcaggaacagtgaccgtgaccgatcacttccgcgcctgggcgaaccggggcctgaacctcggcacaatagaccaaattacattgtgcgtggagggttaccaaagctctggatcagccaacatcacccagaacaccttctctcagggctcttcttccggcagttcgggtggctcatccggctccacaacgactactcgcatcgagtgtgagaacatgtccttgtccggaccctacgttagcaggatcaccaatccctttaatggtattgcgctgtacgccaacggagacacagcccgcgctaccgttaacttccccgcaagtcgcaactacaatttccgcctgcggggttgcggcaacaacaataatcttgcccgtgtggacctgaggatcgacggacggaccgtcgggaccttttattaccagggcacatacccctgggaggccccaattgacaatgtttatgtcagtgcggggagtcatacagtcgaaatcactgttactgcggataacggcacatgggacgtgtatgccgactacctggtgatacagtgactcgagggggggcccggtacccaattcgccctatagtgagtcgtattacaattcactggccgtcgttttacaacgtcgtgactgggaaaaccctggcgttacccaacttaatcgccttgcagcacatccccctttcgccagctggcgtaatagcgaagaggcccgcaccgatcgcccttcccaacagttgcgcagcctgaatggcgaatggaaattgtaagcgttaatattttgttaaaattcgcgttaaatttttgttaaatcagctcattttttaaccaataggccgaaatcggcaaaatcccttataaatcaaaagaatagaccgagatagggttgagtgttgttccagtttggaacaagagtccactattaaagaacgtggactccaacgtcaaagggcgaaaaaccgtctatcagggcgatggcccactacgtgaaccatcaccctaatcaagttttttggggtcgaggtgccgtaaagcactaaatcggaaccctaaagggagcccccgatttagagcttgacggggaaagccggcgaacgtggcgagaaaggaagggaagaaagcgaaaggagcgggcgctagggcgctggcaagtgtagcggtcacgctgcgcgtaaccaccacacccgccgcgcttaatgcgccgctacagggcgcgtcaggtg

SEQ ID NO: 3022 - DNA, 5168 bp, Artificial Sequence
  Synthetic Construct, AS-22 intein modified protein encoding nucleic acids in pBluescript
gcacttttcggggaaatgtgcgcggaacccctatttgtttatttttctaaatacattcaaatatgtatccgctcatgagacaataaccctgataaatgcttcaataatattgaaaaaggaagagtatgagtattcaacatttccgtgtcgcccttattcccttttttgcggcattttgccttcctgtttttgctcacccagaaacgctggtgaaagtaaaagatgctgaagatcagttgggtgcacgagtgggttacatcgaactggatctcaacagcggtaagatccttgagagttttcgccccgaagaacgttttccaatgatgagcacttttaaagttctgctatgtggcgcggtattatcccgtattgacgccgggcaagagcaactcggtcgccgcatacactattctcagaatgacttggttgagtactcaccagtcacagaaaagcatcttacggatggcatgacagtaagagaattatgcagtgctgccataaccatgagtgataacactgcggccaacttacttctgacaacgatcggaggaccgaaggagctaaccgcttttttgcacaacatgggggatcatgtaactcgccttgatcgttgggaaccggagctgaatgaagccataccaaacgacgagcgtgacaccacgatgcctgtagcaatggcaacaacgttgcgcaaactattaactggcgaactacttactctagcttcccggcaacaattaatagactggatggaggcggataaagttgcaggaccacttctgcgctcggcccttccggctggctggtttattgctgataaatctggagccggtgagcgtgggtctcgcggtatcattgcagcactggggccagatggtaagccctcccgtatcgtagttatctacacgacggggagtcaggcaactatggatgaacgaaatagacagatcgctgagataggtgcctcactgattaagcattggtaactgtcagaccaagtttactcatatatactttagattgatttaaaacttcatttttaatttaaaaggatctaggtgaagatcctttttgataatctcatgaccaaaatcccttaacgtgagttttcgttccactgagcgtcagaccccgtagaaaagatcaaaggatcttcttgagatcctttttttctgcgcgtaatctgctgcttgcaaacaaaaaaaccaccgctaccagcggtggtttgtttgccggatcaagagctaccaactctttttccgaaggtaactggcttcagcagagcgcagataccaaatactgtccttctagtgtagccgtagttaggccaccacttcaagaactctgtagcaccgcctacatacctcgctctgctaatcctgttaccagtggctgctgccagtggcgataagtcgtgtcttaccgggttggactcaagacgatagttaccggataaggcgcagcggtcgggctgaacggggggttcgtgcacacagcccagcttggagcgaacgacctacaccgaactgagatacctacagcgtgagctatgagaaagcgccacgcttcccgaagggagaaaggcggacaggtatccggtaagcggcagggtcggaacaggagagcgcacgagggagcttccagggggaaacgcctggtatctttatagtcctgtcgggtttcgccacctctgacttgagcgtcgatttttgtgatgctcgtcaggggggcggagcctatggaaaaacgccagcaacgcggcctttttacggttcctggccttttgctggccttttgctcacatgttctttcctgcgttatcccctgattctgtggataaccgtattaccgcctttgagtgagctgataccgctcgccgcagccgaacgaccgagcgcagcgagtcagtgagcgaggaagcggaagagcgcccaatacgcaaaccgcctctccccgcgcgttggccgattcattaatgcagctggcacgacaggtttcccgactggaaagcgggcagtgagcgcaacgcaattaatgtgagttagctcactcattaggcaccccaggctttacactttatgcttccggctcgtatgttgtgtggaattgtgagcggataacaatttcacacaggaaacagcatatgcaaacaagcattactctgacatccaacgcatccggtacgtttgacggttactattacgaactctggaaggatactggcaatacaacaatgacggtctacactcaaggtcgcttttcctgccagtggtcgaacatcaataacgcgttgtttaggaccgggaagaaatacaaccagaattggcagtctcttggcacaatccggatcacgtactctgcgacttacaacccaaacgggaactcctacttgtgtatctatggctggtctaccaacccattggtcgagttctacatcgttgagtcctgggggaactggagaccgcctggtgccacgtccctgggccaagtgacaatcgatggcgggacctacgacatctataggacgacacgcgtcaaccagccttgcgtggtcgcgggcactgaggtcacagacgctgagacaggggcggtcgttacggtcggggagctcttcgagtcgcggagggcggtcacagtccacgctctcggcgctgacagcaagctgaggccaaggcctgttactgatgtggtctggaacgggcgcaagagggtgtaccgcctcaccacggagctgggcaagtcgatcacagccactgacaaccatcctttccgcgtgctggatggctggaagaatctcggggagctgaagccaggcgacaggatcgctgctccaaggaggctggcggtcccttcggctggcacctggccgcagcacgagattgttgcgctcgctgggctcctgtctgagggcaacacgtgccatcccacaactctctacttctacgggaatgaccgggttctgatcgacgatttcgcgcgggcaattggccagttccccgatacagtcgccaaggtttacgctaggccaaacaggaggaacctggaggtgcgcgctaacacaggcagggacactcgcctgaagtcaagggcggagagggatgctgctgtggctctcctggctccaccaacgaggtccggcgctttcgtctgggctcagaggctcggcatcctggggaagaccgctacggagaagttcgtgcctcacgacgtcttccggctctgcgacagcgatctggagctcttcctgggcaggctgtgggctggcgacgggttcattgctaatgataccctcaaggtcccgttctacgctacgtccagcaggaggctcgctcaggacgtgcagcacctcctgctcaggctgggcatcgtcgggaggattcatgagaagcagttcaagtacaagggcgggctcaagcccggcttcacagtgcacctgatcggcgacggggctgctgaggccttcctcgataggattgctccacactgcctggggagggagcatgctgtcactatcctcagggagcatgttgctaccacggcgaggggcctcacctccaaggacacggttccgctggaggtgcgcgcttgggtcgacgatgggaggagggcgaggggcctcacctgggacgagctggagcagcagtcggatgtctctacacaggagttctacggcactccagctccaggcaagaaggggttccggagggctacgatcgctaagctcgctgcgttcttcggctcacagaggctggctgctgttgctgactccgatgtgttctgggacagggttgtgagcattgagtacgcgggcgtgcaggatacctacgatctcacagtggatgaggatcataatttcgttgctaatgggctcatcgttcacaattccattgtggggacagccacgttcgatcagtactggagcgtgcgcacctctaagcggacttcaggaacagtgaccgtgaccgatcacttccgcgcctgggcgaaccggggcctgaacctcggcacaatagaccaaattacattgtgcgtggagggttaccaaagctctggatcagccaacatcacccagaacaccttctctcagggctcttcttccggcagttcgggtggctcatccggctccacaacgactactcgcatcgagtgtgagaacatgtccttgtccggaccctacgttagcaggatcaccaatccctttaatggtattgcgctgtacgccaacggagacacagcccgcgctaccgttaacttccccgcaagtcgcaactacaatttccgcctgcggggttgcggcaacaacaataatcttgcccgtgtggacctgaggatcgacggacggaccgtcgggaccttttattaccagggcacatacccctgggaggccccaattgacaatgtttatgtcagtgcggggagtcatacagtcgaaatcactgttactgcggataacggcacatgggacgtgtatgccgactacctggtgatacagtgactcgagggggggcccggtacccaattcgccctatagtgagtcgtattacaattcactggccgtcgttttacaacgtcgtgactgggaaaaccctggcgttacccaacttaatcgccttgcagcacatccccctttcgccagctggcgtaatagcgaagaggcccgcaccgatcgcccttcccaacagttgcgcagcctgaatggcgaatggaaattgtaagcgttaatattttgttaaaattcgcgttaaatttttgttaaatcagctcattttttaaccaataggccgaaatcggcaaaatcccttataaatcaaaagaatagaccgagatagggttgagtgttgttccagtttggaacaagagtccactattaaagaacgtggactccaacgtcaaagggcgaaaaaccgtctatcagggcgatggcccactacgtgaaccatcaccctaatcaagttttttggggtcgaggtgccgtaaagcactaaatcggaaccctaaagggagcccccgatttagagcttgacggggaaagccggcgaacgtggcgagaaaggaagggaagaaagcgaaaggagcgggcgctagggcgctggcaagtgtagcggtcacgctgcgcgtaaccaccacacccgccgcgcttaatgcgccgctacagggcgcgtcaggtg

SEQ ID NO: 3023 - DNA, 4691 bp, Artificial Sequence
  Synthetic Construct, AS-23 intein modified protein encoding nucleic acids in pBluescript
gcacttttcggggaaatgtgcgcggaacccctatttgtttatttttctaaatacattcaaatatgtatccgctcatgagacaataaccctgataaatgcttcaataatattgaaaaaggaagagtatgagtattcaacatttccgtgtcgcccttattcccttttttgcggcattttgccttcctgtttttgctcacccagaaacgctggtgaaagtaaaagatgctgaagatcagttgggtgcacgagtgggttacatcgaactggatctcaacagcggtaagatccttgagagttttcgccccgaagaacgttttccaatgatgagcacttttaaagttctgctatgtggcgcggtattatcccgtattgacgccgggcaagagcaactcggtcgccgcatacactattctcagaatgacttggttgagtactcaccagtcacagaaaagcatcttacggatggcatgacagtaagagaattatgcagtgctgccataaccatgagtgataacactgcggccaacttacttctgacaacgatcggaggaccgaaggagctaaccgcttttttgcacaacatgggggatcatgtaactcgccttgatcgttgggaaccggagctgaatgaagccataccaaacgacgagcgtgacaccacgatgcctgtagcaatggcaacaacgttgcgcaaactattaactggcgaactacttactctagcttcccggcaacaattaatagactggatggaggcggataaagttgcaggaccacttctgcgctcggcccttccggctggctggtttattgctgataaatctggagccggtgagcgtgggtctcgcggtatcattgcagcactggggccagatggtaagccctcccgtatcgtagttatctacacgacggggagtcaggcaactatggatgaacgaaatagacagatcgctgagataggtgcctcactgattaagcattggtaactgtcagaccaagtttactcatatatactttagattgatttaaaacttcatttttaatttaaaaggatctaggtgaagatcctttttgataatctcatgaccaaaatcccttaacgtgagttttcgttccactgagcgtcagaccccgtagaaaagatcaaaggatcttcttgagatcctttttttctgcgcgtaatctgctgcttgcaaacaaaaaaaccaccgctaccagcggtggtttgtttgccggatcaagagctaccaactctttttccgaaggtaactggcttcagcagagcgcagataccaaatactgtccttctagtgtagccgtagttaggccaccacttcaagaactctgtagcaccgcctacatacctcgctctgctaatcctgttaccagtggctgctgccagtggcgataagtcgtgtcttaccgggttggactcaagacgatagttaccggataaggcgcagcggtcgggctgaacggggggttcgtgcacacagcccagcttggagcgaacgacctacaccgaactgagatacctacagcgtgagctatgagaaagcgccacgcttcccgaagggagaaaggcggacaggtatccggtaagcggcagggtcggaacaggagagcgcacgagggagcttccagggggaaacgcctggtatctttatagtcctgtcgggtttcgccacctctgacttgagcgtcgatttttgtgatgctcgtcaggggggcggagcctatggaaaaacgccagcaacgcggcctttttacggttcctggccttttgctggccttttgctcacatgttctttcctgcgttatcccctgattctgtggataaccgtattaccgcctttgagtgagctgataccgctcgccgcagccgaacgaccgagcgcagcgagtcagtgagcgaggaagcggaagagcgcccaatacgcaaaccgcctctccccgcgcgttggccgattcattaatgcagctggcacgacaggtttcccgactggaaagcgggcagtgagcgcaacgcaattaatgtgagttagctcactcattaggcaccccaggctttacactttatgcttccggctcgtatgttgtgtggaattgtgagcggataacaatttcacacaggaaacagcatatgcaaacaagcattactctgacatccaacgcatccggtacgtttgacggttactattacgaactctggaaggatactggcaatacaacaatgacggtctacactcaaggtcgcttttcctgccagtggtcgaacatcaataacgcgttgtttaggaccgggaagaaatacaaccagaattggcagtctcttggcacaatccggatcacgtactctgcgacttacaacccaaacgggaactcctacttgtgtatctatggctggtctaccaacccattggtcgagttctacatcgttgagtcctgggggaactggagaccgcctggtgccacgtccctgggccaagtgacaatcgatggcgggacctacgacatctataggacgacacgcgtcaaccagccttgccagcctgcggggacacaggtcgctaaggttattaaggaggggaggtggagggaggattcggttattgagcaggttcctattgagtcactccagccaggcgacagggtggtctccttcgggaacgcgaagatctaccgcaggggccgcgctgtgacagggattacttcccggcgccacacaggcaatctgcatagggtcgaggttggggagttccgcaccagggccacgccagagcacaggttcaccgtccggttcgacccagctaggcctaaggctggcctcctgtacctcatgaggaggggcgataggtggagggtgggcgtctgcgggatgttcaactcgcgcggcttcggggtttccgtgcggctgagccaggagaggggcgacgctgcttgggtgctcggggccttcgcgacactgactgaggctaggatcgccgagcaggttgtgagctgccggtacggcattccaaccacggtctgggagaccggcaggaatcctggggcttcgtgggctcagagggaccaggctggcatcgatgccatctaccagaggctcggcgtcgataggatccgggctggggttgacaggctcctgagggatcacggcctctctgctgggctgccactcctggctgccaacgagcccggcaatttctcgtgcaggcagtctaggcaggtggctgcttgcaacctggtgccaggcgtcatgcaggtcccagttccaacggctggcgagaggttcgagtggagggacctcaccgctacgagcttcgagagggttcatgatctggaggtgtggagcatggatgtggagagggataagcattacgttgcggatggcatcgttgtgcataactccattgtggggacagccacgttcgatcagtactggagcgtgcgcacctctaagcggacttcaggaacagtgaccgtgaccgatcacttccgcgcctgggcgaaccggggcctgaacctcggcacaatagaccaaattacattgtgcgtggagggttaccaaagctctggatcagccaacatcacccagaacaccttctctcagggctcttcttccggcagttcgggtggctcatccggctccacaacgactactcgcatcgagtgtgagaacatgtccttgtccggaccctacgttagcaggatcaccaatccctttaatggtattgcgctgtacgccaacggagacacagcccgcgctaccgttaacttccccgcaagtcgcaactacaatttccgcctgcggggttgcggcaacaacaataatcttgcccgtgtggacctgaggatcgacggacggaccgtcgggaccttttattaccagggcacatacccctgggaggccccaattgacaatgtttatgtcagtgcggggagtcatacagtcgaaatcactgttactgcggataacggcacatgggacgtgtatgccgactacctggtgatacagtgactcgagggggggcccggtacccaattcgccctatagtgagtcgtattacaattcactggccgtcgttttacaacgtcgtgactgggaaaaccctggcgttacccaacttaatcgccttgcagcacatccccctttcgccagctggcgtaatagcgaagaggcccgcaccgatcgcccttcccaacagttgcgcagcctgaatggcgaatggaaattgtaagcgttaatattttgttaaaattcgcgttaaatttttgttaaatcagctcattttttaaccaataggccgaaatcggcaaaatcccttataaatcaaaagaatagaccgagatagggttgagtgttgttccagtttggaacaagagtccactattaaagaacgtggactccaacgtcaaagggcgaaaaaccgtctatcagggcgatggcccactacgtgaaccatcaccctaatcaagttttttggggtcgaggtgccgtaaagcactaaatcggaaccctaaagggagcccccgatttagagcttgacggggaaagccggcgaacgtggcgagaaaggaagggaagaaagcgaaaggagcgggcgctagggcgctggcaagtgtagcggtcacgctgcgcgtaaccaccacacccgccgcgcttaatgcgccgctacagggcgcgtcaggtg

SEQ ID NO: 3024 - DNA, 5066 bp, Artificial Sequence
  Synthetic Construct, AS-24 intein modified protein encoding nucleic acids in pBluescript
gcacttttcggggaaatgtgcgcggaacccctatttgtttatttttctaaatacattcaaatatgtatccgctcatgagacaataaccctgataaatgcttcaataatattgaaaaaggaagagtatgagtattcaacatttccgtgtcgcccttattcccttttttgcggcattttgccttcctgtttttgctcacccagaaacgctggtgaaagtaaaagatgctgaagatcagttgggtgcacgagtgggttacatcgaactggatctcaacagcggtaagatccttgagagttttcgccccgaagaacgttttccaatgatgagcacttttaaagttctgctatgtggcgcggtattatcccgtattgacgccgggcaagagcaactcggtcgccgcatacactattctcagaatgacttggttgagtactcaccagtcacagaaaagcatcttacggatggcatgacagtaagagaattatgcagtgctgccataaccatgagtgataacactgcggccaacttacttctgacaacgatcggaggaccgaaggagctaaccgcttttttgcacaacatgggggatcatgtaactcgccttgatcgttgggaaccggagctgaatgaagccataccaaacgacgagcgtgacaccacgatgcctgtagcaatggcaacaacgttgcgcaaactattaactggcgaactacttactctagcttcccggcaacaattaatagactggatggaggcggataaagttgcaggaccacttctgcgctcggcccttccggctggctggtttattgctgataaatctggagccggtgagcgtgggtctcgcggtatcattgcagcactggggccagatggtaagccctcccgtatcgtagttatctacacgacggggagtcaggcaactatggatgaacgaaatagacagatcgctgagataggtgcctcactgattaagcattggtaactgtcagaccaagtttactcatatatactttagattgatttaaaacttcatttttaatttaaaaggatctaggtgaagatcctttttgataatctcatgaccaaaatcccttaacgtgagttttcgttccactgagcgtcagaccccgtagaaaagatcaaaggatcttcttgagatcctttttttctgcgcgtaatctgctgcttgcaaacaaaaaaaccaccgctaccagcggtggtttgtttgccggatcaagagctaccaactctttttccgaaggtaactggcttcagcagagcgcagataccaaatactgtccttctagtgtagccgtagttaggccaccacttcaagaactctgtagcaccgcctacatacctcgctctgctaatcctgttaccagtggctgctgccagtggcgataagtcgtgtcttaccgggttggactcaagacgatagttaccggataaggcgcagcggtcgggctgaacggggggttcgtgcacacagcccagcttggagcgaacgacctacaccgaactgagatacctacagcgtgagctatgagaaagcgccacgcttcccgaagggagaaaggcggacaggtatccggtaagcggcagggtcggaacaggagagcgcacgagggagcttccagggggaaacgcctggtatctttatagtcctgtcgggtttcgccacctctgacttgagcgtcgatttttgtgatgctcgtcaggggggcggagcctatggaaaaacgccagcaacgcggcctttttacggttcctggccttttgctggccttttgctcacatgttctttcctgcgttatcccctgattctgtggataaccgtattaccgcctttgagtgagctgataccgctcgccgcagccgaacgaccgagcgcagcgagtcagtgagcgaggaagcggaagagcgcccaatacgcaaaccgcctctccccgcgcgttggccgattcattaatgcagctggcacgacaggtttcccgactggaaagcgggcagtgagcgcaacgcaattaatgtgagttagctcactcattaggcaccccaggctttacactttatgcttccggctcgtatgttgtgtggaattgtgagcggataacaatttcacacaggaaacagcatatgcaaacaagcattactctgacatccaacgcatccggtacgtttgacggttactattacgaactctggaaggatactggcaatacaacaatgacggtctacactcaaggtcgcttttcctgccagtggtcgaacatcaataacgcgttgtttaggaccgggaagaaatacaaccagaattggcagtctcttggcacaatccggatcacgtactctgcgacttacaacccaaacgggaactcctacttgtgtatctatggctggtctaccaacccattggtcgagttctacatcgttgagtcctgggggaactggagaccgcctggtgccacgtccctgggccaagtgacaatcgatggcgggacctacgacatctataggacgacacgcgtcaaccagccttgcttcgctgcggggacgctgctgcatactgagcagggctacgttccggtggagcaggtcgtggcgggggtcgggacaagggtttgcacacaccagggcttccggaacatctctgagcgcttcgataatggggaggccgaggttttcagggtgaccacgcggaagggctactccgtggaggtcactgcgaaccacaagatggctcgcctcgacgagaatggcgatctcctgctcgacgagctctcacatctgcaagtgggcgacaacctgctcctgctcctggggtccaatccggtgaccgagaaggtccggctgcagtgcatcccagctggctaccgctccagcatcgagattgctcagccgcccgagctcgatgagcagctggcttacctcctgggctacgcctacggcgacgggtgcgtcggcaggggggctacatacaactacctcagcctggctgtgtcgcacacttacccgaatgtccgcgaccagctcgccgcgatcattagggagaagttcggcctgacaactaagatctactcaggctccggggcggtttggaacctcctggtgcattccgccaatctcctggattggctcaaggcgaacggcctcctgaagcagaaggctgcggacctcgccatgccagaggcgattctgcgctcgccttcgtctgtggtcggcgctttcctgtctgggtacttcgacgctgatggctgcgtgaggggcgggaagggcgggtacgggttcgattgcacgagcaaggctttcgtcggcgctgttcagctcctgctcctggccgaggggatcgtgtccaacctccacaccacggaccggagccgccagggctggcgcacaatctacaggctcaatgtctgcggcaccgagttcaagcgcaggttccagacgctgtgctgcaggtctgcgaaggttgtgcattcaccaatggtgctcggcagggatgggaccggcgggtacccacctgctctggttaggggcgcttcgtaccagagggtcgttgctgtcggcgggaagcacctcctgtacacggcgctcctgaaggtcatcgagaagacaaggactgctggcaagcaggctctcgctgagagcctgtgccagcatgtcaactacttcccggaccccatcgtcgcgattgagtcggttggcacgcagagggtttacgatattgaggtggagggcatgcatctgctcggcaatggcatctacacaagcaactccattgtggggacagccacgttcgatcagtactggagcgtgcgcacctctaagcggacttcaggaacagtgaccgtgaccgatcacttccgcgcctgggcgaaccggggcctgaacctcggcacaatagaccaaattacattgtgcgtggagggttaccaaagctctggatcagccaacatcacccagaacaccttctctcagggctcttcttccggcagttcgggtggctcatccggctccacaacgactactcgcatcgagtgtgagaacatgtccttgtccggaccctacgttagcaggatcaccaatccctttaatggtattgcgctgtacgccaacggagacacagcccgcgctaccgttaacttccccgcaagtcgcaactacaatttccgcctgcggggttgcggcaacaacaataatcttgcccgtgtggacctgaggatcgacggacggaccgtcgggaccttttattaccagggcacatacccctgggaggccccaattgacaatgtttatgtcagtgcggggagtcatacagtcgaaatcactgttactgcggataacggcacatgggacgtgtatgccgactacctggtgatacagtgactcgagggggggcccggtacccaattcgccctatagtgagtcgtattacaattcactggccgtcgttttacaacgtcgtgactgggaaaaccctggcgttacccaacttaatcgccttgcagcacatccccctttcgccagctggcgtaatagcgaagaggcccgcaccgatcgcccttcccaacagttgcgcagcctgaatggcgaatggaaattgtaagcgttaatattttgttaaaattcgcgttaaatttttgttaaatcagctcattttttaaccaataggccgaaatcggcaaaatcccttataaatcaaaagaatagaccgagatagggttgagtgttgttccagtttggaacaagagtccactattaaagaacgtggactccaacgtcaaagggcgaaaaaccgtctatcagggcgatggcccactacgtgaaccatcaccctaatcaagttttttggggtcgaggtgccgtaaagcactaaatcggaaccctaaagggagcccccgatttagagcttgacggggaaagccggcgaacgtggcgagaaaggaagggaagaaagcgaaaggagcgggcgctagggcgctggcaagtgtagcggtcacgctgcgcgtaaccaccacacccgccgcgcttaatgcgccgctacagggcgcgtcaggtg

SEQ ID NO: 3025 - DNA, 5306 bp, Artificial Sequence
  Synthetic Construct, AS-25 intein modified protein encoding nucleic acids in pBluescript
gcacttttcggggaaatgtgcgcggaacccctatttgtttatttttctaaatacattcaaatatgtatccgctcatgagacaataaccctgataaatgcttcaataatattgaaaaaggaagagtatgagtattcaacatttccgtgtcgcccttattcccttttttgcggcattttgccttcctgtttttgctcacccagaaacgctggtgaaagtaaaagatgctgaagatcagttgggtgcacgagtgggttacatcgaactggatctcaacagcggtaagatccttgagagttttcgccccgaagaacgttttccaatgatgagcacttttaaagttctgctatgtggcgcggtattatcccgtattgacgccgggcaagagcaactcggtcgccgcatacactattctcagaatgacttggttgagtactcaccagtcacagaaaagcatcttacggatggcatgacagtaagagaattatgcagtgctgccataaccatgagtgataacactgcggccaacttacttctgacaacgatcggaggaccgaaggagctaaccgcttttttgcacaacatgggggatcatgtaactcgccttgatcgttgggaaccggagctgaatgaagccataccaaacgacgagcgtgacaccacgatgcctgtagcaatggcaacaacgttgcgcaaactattaactggcgaactacttactctagcttcccggcaacaattaatagactggatggaggcggataaagttgcaggaccacttctgcgctcggcccttccggctggctggtttattgctgataaatctggagccggtgagcgtgggtctcgcggtatcattgcagcactggggccagatggtaagccctcccgtatcgtagttatctacacgacggggagtcaggcaactatggatgaacgaaatagacagatcgctgagataggtgcctcactgattaagcattggtaactgtcagaccaagtttactcatatatactttagattgatttaaaacttcatttttaatttaaaaggatctaggtgaagatcctttttgataatctcatgaccaaaatcccttaacgtgagttttcgttccactgagcgtcagaccccgtagaaaagatcaaaggatcttcttgagatcctttttttctgcgcgtaatctgctgcttgcaaacaaaaaaaccaccgctaccagcggtggtttgtttgccggatcaagagctaccaactctttttccgaaggtaactggcttcagcagagcgcagataccaaatactgtccttctagtgtagccgtagttaggccaccacttcaagaactctgtagcaccgcctacatacctcgctctgctaatcctgttaccagtggctgctgccagtggcgataagtcgtgtcttaccgggttggactcaagacgatagttaccggataaggcgcagcggtcgggctgaacggggggttcgtgcacacagcccagcttggagcgaacgacctacaccgaactgagatacctacagcgtgagctatgagaaagcgccacgcttcccgaagggagaaaggcggacaggtatccggtaagcggcagggtcggaacaggagagcgcacgagggagcttccagggggaaacgcctggtatctttatagtcctgtcgggtttcgccacctctgacttgagcgtcgatttttgtgatgctcgtcaggggggcggagcctatggaaaaacgccagcaacgcggcctttttacggttcctggccttttgctggccttttgctcacatgttctttcctgcgttatcccctgattctgtggataaccgtattaccgcctttgagtgagctgataccgctcgccgcagccgaacgaccgagcgcagcgagtcagtgagcgaggaagcggaagagcgcccaatacgcaaaccgcctctccccgcgcgttggccgattcattaatgcagctggcacgacaggtttcccgactggaaagcgggcagtgagcgcaacgcaattaatgtgagttagctcactcattaggcaccccaggctttacactttatgcttccggctcgtatgttgtgtggaattgtgagcggataacaatttcacacaggaaacagcatatgcaaacaagcattactctgacatccaacgcatccggtacgtttgacggttactattacgaactctggaaggatactggcaatacaacaatgacggtctacactcaaggtcgcttttcctgccagtggtcgaacatcaataacgcgttgtttaggaccgggaagaaatacaaccagaattggcagtctcttggcacaatccggatcacgtactctgcgacttacaacccaaacgggaactcctacttgtgtatctatggctggtctaccaacccattggtcgagttctacatcgttgagtcctgggggaactggagaccgcctggtgccacgtccctgggccaagtgacaatcgatggcgggacctacgacatctataggacgacacgcgtcaaccagccttgcctcgcctacgacgcggagatcgttcaggctgacgggggggttaagactattgagcagatcgttagggagcggcgggcgcatctcgctacggtcggcgctgactggaggctgacatggactgagccgtgcgattacgttgacgatggccacaagcccgtcttcgaggttaccacgcgcctcgggcgcaggatcgagacaactctgacacacccgttcctcactgtccatggctggcagaggctggaggacctcgctgagggcgatgctatcggggtcccaaggcagctgccagttttcggccaggagcccattagggactgcgaggtgaggctcctgggccacctgatcggggatggcgggctcaccggctcgccacccaggctgacgtctgggcaggaggcgatgacagctgacttcctggaggctgtggatgctttcggcggggtcgaggctaagccaatcagggcgtcccggaggacgcagagctgggtggtcgttggcgctgctcaggcccgcgctgctgctaggtccagcttcgcttcactggtcgacgccctcattaggaggtcccctctcaccggcagggctatcgctaggaacctgggggtggcgccagctaccctcacgtactggaggcagggcgtgaatgtccctgacgctgctatggttgggctcctggctggcgagctgggggttgatgtgggcgagctcaggccagagcctgtggctcgcaggaacgaccgcaatccactgcaggcttggctcgataggctgggcctcgctgggaagtccgctcacgagaagactgtgccagactgcgtcttccggctgcctcgcgagcagctcgctaggttcctgaaccggctcttctcgtctgacgggtgggtgacacatctggctagcggccaggggcagattggctacaccacggtctcggaggctctcgctaggcagatccagcacctcctgctccggttcggcgttctggctaagctcaggcataggtccgtgcgctaccaggacggcaggaggccagcctggcagctggatattactcacgcggagagcatcctcaccttcgctgagcagatcggcattctggggaaggagcagcggctcgcctctgttgctgcttcagtgcgcggcaggaggaggcagtcgcacacggaccatatcccctgcgagatttggcagttcatcgatagggccaggggcgagtggacatgggctgagctggctaggagggctggggtcgcttcatccaatatccacgcctacaggaggggcatgtctaggcagaggctggctgctttcgctgacgctctcggctcaagggagctgaggcagctcgcgagctcggacctgtactgggatcggatcgcctccattcgcccgctcggccataagcaggtgtacgatctcactattccagagactcataacttcattgctaatgatgtttgcgtgcataattccattgtggggacagccacgttcgatcagtactggagcgtgcgcacctctaagcggacttcaggaacagtgaccgtgaccgatcacttccgcgcctgggcgaaccggggcctgaacctcggcacaatagaccaaattacattgtgcgtggagggttaccaaagctctggatcagccaacatcacccagaacaccttctctcagggctcttcttccggcagttcgggtggctcatccggctccacaacgactactcgcatcgagtgtgagaacatgtccttgtccggaccctacgttagcaggatcaccaatccctttaatggtattgcgctgtacgccaacggagacacagcccgcgctaccgttaacttccccgcaagtcgcaactacaatttccgcctgcggggttgcggcaacaacaataatcttgcccgtgtggacctgaggatcgacggacggaccgtcgggaccttttattaccagggcacatacccctgggaggccccaattgacaatgtttatgtcagtgcggggagtcatacagtcgaaatcactgttactgcggataacggcacatgggacgtgtatgccgactacctggtgatacagtgactcgagggggggcccggtacccaattcgccctatagtgagtcgtattacaattcactggccgtcgttttacaacgtcgtgactgggaaaaccctggcgttacccaacttaatcgccttgcagcacatccccctttcgccagctggcgtaatagcgaagaggcccgcaccgatcgcccttcccaacagttgcgcagcctgaatggcgaatggaaattgtaagcgttaatattttgttaaaattcgcgttaaatttttgttaaatcagctcattttttaaccaataggccgaaatcggcaaaatcccttataaatcaaaagaatagaccgagatagggttgagtgttgttccagtttggaacaagagtccactattaaagaacgtggactccaacgtcaaagggcgaaaaaccgtctatcagggcgatggcccactacgtgaaccatcaccctaatcaagttttttggggtcgaggtgccgtaaagcactaaatcggaaccctaaagggagcccccgatttagagcttgacggggaaagccggcgaacgtggcgagaaaggaagggaagaaagcgaaaggagcgggcgctagggcgctggcaagtgtagcggtcacgctgcgcgtaaccaccacacccgccgcgcttaatgcgccgctacagggcgcgtcaggtg

SEQ ID NO: 3026 - DNA, 5261 bp, Artificial Sequence
  Synthetic Construct, AS-26 intein modified protein encoding nucleic acids in pBluescript
gcacttttcggggaaatgtgcgcggaacccctatttgtttatttttctaaatacattcaaatatgtatccgctcatgagacaataaccctgataaatgcttcaataatattgaaaaaggaagagtatgagtattcaacatttccgtgtcgcccttattcccttttttgcggcattttgccttcctgtttttgctcacccagaaacgctggtgaaagtaaaagatgctgaagatcagttgggtgcacgagtgggttacatcgaactggatctcaacagcggtaagatccttgagagttttcgccccgaagaacgttttccaatgatgagcacttttaaagttctgctatgtggcgcggtattatcccgtattgacgccgggcaagagcaactcggtcgccgcatacactattctcagaatgacttggttgagtactcaccagtcacagaaaagcatcttacggatggcatgacagtaagagaattatgcagtgctgccataaccatgagtgataacactgcggccaacttacttctgacaacgatcggaggaccgaaggagctaaccgcttttttgcacaacatgggggatcatgtaactcgccttgatcgttgggaaccggagctgaatgaagccataccaaacgacgagcgtgacaccacgatgcctgtagcaatggcaacaacgttgcgcaaactattaactggcgaactacttactctagcttcccggcaacaattaatagactggatggaggcggataaagttgcaggaccacttctgcgctcggcccttccggctggctggtttattgctgataaatctggagccggtgagcgtgggtctcgcggtatcattgcagcactggggccagatggtaagccctcccgtatcgtagttatctacacgacggggagtcaggcaactatggatgaacgaaatagacagatcgctgagataggtgcctcactgattaagcattggtaactgtcagaccaagtttactcatatatactttagattgatttaaaacttcatttttaatttaaaaggatctaggtgaagatcctttttgataatctcatgaccaaaatcccttaacgtgagttttcgttccactgagcgtcagaccccgtagaaaagatcaaaggatcttcttgagatcctttttttctgcgcgtaatctgctgcttgcaaacaaaaaaaccaccgctaccagcggtggtttgtttgccggatcaagagctaccaactctttttccgaaggtaactggcttcagcagagcgcagataccaaatactgtccttctagtgtagccgtagttaggccaccacttcaagaactctgtagcaccgcctacatacctcgctctgctaatcctgttaccagtggctgctgccagtggcgataagtcgtgtcttaccgggttggactcaagacgatagttaccggataaggcgcagcggtcgggctgaacggggggttcgtgcacacagcccagcttggagcgaacgacctacaccgaactgagatacctacagcgtgagctatgagaaagcgccacgcttcccgaagggagaaaggcggacaggtatccggtaagcggcagggtcggaacaggagagcgcacgagggagcttccagggggaaacgcctggtatctttatagtcctgtcgggtttcgccacctctgacttgagcgtcgatttttgtgatgctcgtcaggggggcggagcctatggaaaaacgccagcaacgcggcctttttacggttcctggccttttgctggccttttgctcacatgttctttcctgcgttatcccctgattctgtggataaccgtattaccgcctttgagtgagctgataccgctcgccgcagccgaacgaccgagcgcagcgagtcagtgagcgaggaagcggaagagcgcccaatacgcaaaccgcctctccccgcgcgttggccgattcattaatgcagctggcacgacaggtttcccgactggaaagcgggcagtgagcgcaacgcaattaatgtgagttagctcactcattaggcaccccaggctttacactttatgcttccggctcgtatgttgtgtggaattgtgagcggataacaatttcacacaggaaacagcatatgcaaacaagcattactctgacatccaacgcatccggtacgtttgacggttactattacgaactctggaaggatactggcaatacaacaatgacggtctacactcaaggtcgcttttcctgccagtggtcgaacatcaataacgcgttgtttaggaccgggaagaaatacaaccagaattggcagtctcttggcacaatccggatcacgtactctgcgacttacaacccaaacgggaactcctacttgtgtatctatggctggtctaccaacccattggtcgagttctacatcgttgagtcctgggggaactggagaccgcctggtgccacgtccctgggccaagtgacaatcgatggcgggacctacgacatctataggacgacacgcgtcaaccagccttgcgtgcatggggatacaagggttactctcgctgatgggcatgagcggcctattcgggaggtcgtggagtcaaatctggatgatccgaagccagtcgacgatggggtttgggataccgtggacttcgatgtcccttctctgcagtcagacggcacagttgcgactcagaacgctacgaaagtgtggaagcggaaggcgccggagacactctaccgcatcaggaccgctacgggcagggagctggatgtcacaccatcacaccctctcttcgttcagtccgacgggaggttccaggctaggaaggctgaggagctggagtctggcacccatgttgctgtgcccaggaaggtttcaactaacgcctgcaatgagctcgacgtcaccttccggcagtctcaggcccacaaccgcatcgacctcgatctgccaccacagtggacgccagagctcgctaggctgatcgggtacattgttgcggagggctacgtggagcagaggcctgataatacgggctacgtgtccatcacaaacaatgaccgggaggtgctggacgatgccaagagcgtcctggagactctcaacctgaatgtcaccgagcgctccagccacgaggggaagacggcgagggagctcctgtgcagcgctggcgagttcgtgtccttcctcgccagcctggacgagacactcctgcagtcgtctgctgagaggagggtcccgcaggatattatgagggcttccgacaacgtggtcaccgggttcattcggggctacatcgagggggagggccatgtgtcaacgtcccagcgcgagatcacagtcgcgagcatgtcgaagccgctcctggaggacgtcaggaccctcctggttacgcagggcattacagcccagctgcagccccggaacaatgggtcctacaggctcaggatctccggccagagcttccacgactacgcggagcagatcggcttcattactgcccgcaagaccgaggcttgcaggcagttcgaggggacgcatggcaacacaaatctggacattgtgccgaacctgggcccagagctcaggcgcatccgcgaggctctcgggctgactcagagcgagtgcggcctcccaaggtcgacctaccagcactacgagaggggcaggaggaatccctcgcgggattctctggagtcagtgctcgacgctttcgagactaggctggccgagatgaacaatgacactccaatttcggataccgctaggtctgacggcgggggcacgggctcgctcaggcaggatctcaacgggctggctgctctcgtggagggcgacatcgcctgggatcgcatcgagtccattgagcctatcgagcatgacgagaagtgggtctacgatctggagattgagggcacacataactacctcacaaatggggtcgtctctcataattccattgtggggacagccacgttcgatcagtactggagcgtgcgcacctctaagcggacttcaggaacagtgaccgtgaccgatcacttccgcgcctgggcgaaccggggcctgaacctcggcacaatagaccaaattacattgtgcgtggagggttaccaaagctctggatcagccaacatcacccagaacaccttctctcagggctcttcttccggcagttcgggtggctcatccggctccacaacgactactcgcatcgagtgtgagaacatgtccttgtccggaccctacgttagcaggatcaccaatccctttaatggtattgcgctgtacgccaacggagacacagcccgcgctaccgttaacttccccgcaagtcgcaactacaatttccgcctgcggggttgcggcaacaacaataatcttgcccgtgtggacctgaggatcgacggacggaccgtcgggaccttttattaccagggcacatacccctgggaggccccaattgacaatgtttatgtcagtgcggggagtcatacagtcgaaatcactgttactgcggataacggcacatgggacgtgtatgccgactacctggtgatacagtgactcgagggggggcccggtacccaattcgccctatagtgagtcgtattacaattcactggccgtcgttttacaacgtcgtgactgggaaaaccctggcgttacccaacttaatcgccttgcagcacatccccctttcgccagctggcgtaatagcgaagaggcccgcaccgatcgcccttcccaacagttgcgcagcctgaatggcgaatggaaattgtaagcgttaatattttgttaaaattcgcgttaaatttttgttaaatcagctcattttttaaccaataggccgaaatcggcaaaatcccttataaatcaaaagaatagaccgagatagggttgagtgttgttccagtttggaacaagagtccactattaaagaacgtggactccaacgtcaaagggcgaaaaaccgtctatcagggcgatggcccactacgtgaaccatcaccctaatcaagttttttggggtcgaggtgccgtaaagcactaaatcggaaccctaaagggagcccccgatttagagcttgacggggaaagccggcgaacgtggcgagaaaggaagggaagaaagcgaaaggagcgggcgctagggcgctggcaagtgtagcggtcacgctgcgcgtaaccaccacacccgccgcgcttaatgcgccgctacagggcgcgtcaggtg

SEQ ID NO: 3027 - DNA, 5444 bp, Artificial Sequence
  Synthetic Construct, AS-27 intein modified protein encoding nucleic acids in pBluescript
gcacttttcggggaaatgtgcgcggaacccctatttgtttatttttctaaatacattcaaatatgtatccgctcatgagacaataaccctgataaatgcttcaataatattgaaaaaggaagagtatgagtattcaacatttccgtgtcgcccttattcccttttttgcggcattttgccttcctgtttttgctcacccagaaacgctggtgaaagtaaaagatgctgaagatcagttgggtgcacgagtgggttacatcgaactggatctcaacagcggtaagatccttgagagttttcgccccgaagaacgttttccaatgatgagcacttttaaagttctgctatgtggcgcggtattatcccgtattgacgccgggcaagagcaactcggtcgccgcatacactattctcagaatgacttggttgagtactcaccagtcacagaaaagcatcttacggatggcatgacagtaagagaattatgcagtgctgccataaccatgagtgataacactgcggccaacttacttctgacaacgatcggaggaccgaaggagctaaccgcttttttgcacaacatgggggatcatgtaactcgccttgatcgttgggaaccggagctgaatgaagccataccaaacgacgagcgtgacaccacgatgcctgtagcaatggcaacaacgttgcgcaaactattaactggcgaactacttactctagcttcccggcaacaattaatagactggatggaggcggataaagttgcaggaccacttctgcgctcggcccttccggctggctggtttattgctgataaatctggagccggtgagcgtgggtctcgcggtatcattgcagcactggggccagatggtaagccctcccgtatcgtagttatctacacgacggggagtcaggcaactatggatgaacgaaatagacagatcgctgagataggtgcctcactgattaagcattggtaactgtcagaccaagtttactcatatatactttagattgatttaaaacttcatttttaatttaaaaggatctaggtgaagatcctttttgataatctcatgaccaaaatcccttaacgtgagttttcgttccactgagcgtcagaccccgtagaaaagatcaaaggatcttcttgagatcctttttttctgcgcgtaatctgctgcttgcaaacaaaaaaaccaccgctaccagcggtggtttgtttgccggatcaagagctaccaactctttttccgaaggtaactggcttcagcagagcgcagataccaaatactgtccttctagtgtagccgtagttaggccaccacttcaagaactctgtagcaccgcctacatacctcgctctgctaatcctgttaccagtggctgctgccagtggcgataagtcgtgtcttaccgggttggactcaagacgatagttaccggataaggcgcagcggtcgggctgaacggggggttcgtgcacacagcccagcttggagcgaacgacctacaccgaactgagatacctacagcgtgagctatgagaaagcgccacgcttcccgaagggagaaaggcggacaggtatccggtaagcggcagggtcggaacaggagagcgcacgagggagcttccagggggaaacgcctggtatctttatagtcctgtcgggtttcgccacctctgacttgagcgtcgatttttgtgatgctcgtcaggggggcggagcctatggaaaaacgccagcaacgcggcctttttacggttcctggccttttgctggccttttgctcacatgttctttcctgcgttatcccctgattctgtggataaccgtattaccgcctttgagtgagctgataccgctcgccgcagccgaacgaccgagcgcagcgagtcagtgagcgaggaagcggaagagcgcccaatacgcaaaccgcctctccccgcgcgttggccgattcattaatgcagctggcacgacaggtttcccgactggaaagcgggcagtgagcgcaacgcaattaatgtgagttagctcactcattaggcaccccaggctttacactttatgcttccggctcgtatgttgtgtggaattgtgagcggataacaatttcacacaggaaacagcatatgcaaacaagcattactctgacatccaacgcatccggtacgtttgacggttactattacgaactctggaaggatactggcaatacaacaatgacggtctacactcaaggtcgcttttcctgccagtggtcgaacatcaataacgcgttgtttaggaccgggaagaaatacaaccagaattggcagtctcttggcacaatccggatcacgtactctgcgacttacaacccaaacgggaactcctacttgtgtatctatggctggtctaccaacccattggtcgagttctacatcgttgagtcctgggggaactggagaccgcctggtgccacgtccctgggccaagtgacaatcgatggcgggacctacgacatctataggacgacacgcgtcaaccagccttgcctgactgcggattcggacgttctcgttaggtcggagaatggggatattgagcgccagacggtggactctctcttctcggacgggcaggtggtcctcgcggacggcgataccgacatcgctgtttctaaggagacaccgactgtgctctcactggacgaggcgactgagagggtgagcgagcaggagtcgaccctcgtctctgagaggccactgagggacgatgagagcgtccgcaccatcgagacgtcgaggggcgctgtcaccgttacggacgatcacccaatgtacatcaggcaggacggcgaagtgactgtccggcctgcttccgacattgaggctgggaccgatctcgtggctgctaggaggccaccagacacgatggtcgagccatcagatgagacggttctgtcctgggagacattcgctgccgattgcgacaagcattctaagctctacggcgtcgactgcgggacagagctggctgctcagagggctgcgcgcgatgagtcccagactgctttcgctgagcgctacggctcgtacgggtctgctgtgggcaagtacgagaggggggagaaggacgttccggtgtggctcctgggcgagctcgacatcaggccagatcggattcacgggctgaactacgagacgtcgttcgagaatccattccctctggagtggtccccagagctggctcaggtcatcggctgcctcctgggcgacgggagcattcaccggaacgacgatgagaatgttgtggacgtgcgctaccataacacagatgaggctctcatcgagcgcttcgccagggacatcgagcgcctgttcgatattgagccaacagtcactgacaggcctggcagggagagccaccataagaggaagtaccaggtcgatgttccatcggctgtcggcagggtgctcgtctgcgttctggaggccgtgacggagaacggcacaccagggctcccagacgcggtccggcctgctttcgttggcgccctgttcgacgatgagggccacatctcccgcgaggggaaggcgttcattagcaatacagaccatactctcctgaccggcgtcggggagatgctcgctgagatgggcatcgagaccaagctcgcgccagaccagcacaagctgcatattaggggcaggaggaacctggagcagttcctggaccggatccctattgcgagcgatgagaagttctaccgcggcctcgatgctctggacgcctacgatgtgaccacgaggaaggctgagctcctggaggcgatcaggcaggagccaaagacctcggctgctctcgctcagactctgggcgtgaccagggggtccgtcaataagtacctcagggagctgcgggagtccggccacatcgagaagcagattgaggggtcaaaccggtccctcgacgagaatcgcacggttcagtatgtggcggctgatttcgagggctccgtgtacgctacgctgaggggggagccgtccagcgtgacagtcgaggacgttgagaggcgggagtacgacggccccgtgtacgatctgacggtttcagagaatgctccaaacttcgctgtcaatgggggggctgtggttcataactcttccattgtggggacagccacgttcgatcagtactggagcgtgcgcacctctaagcggacttcaggaacagtgaccgtgaccgatcacttccgcgcctgggcgaaccggggcctgaacctcggcacaatagaccaaattacattgtgcgtggagggttaccaaagctctggatcagccaacatcacccagaacaccttctctcagggctcttcttccggcagttcgggtggctcatccggctccacaacgactactcgcatcgagtgtgagaacatgtccttgtccggaccctacgttagcaggatcaccaatccctttaatggtattgcgctgtacgccaacggagacacagcccgcgctaccgttaacttccccgcaagtcgcaactacaatttccgcctgcggggttgcggcaacaacaataatcttgcccgtgtggacctgaggatcgacggacggaccgtcgggaccttttattaccagggcacatacccctgggaggccccaattgacaatgtttatgtcagtgcggggagtcatacagtcgaaatcactgttactgcggataacggcacatgggacgtgtatgccgactacctggtgatacagtgactcgagggggggcccggtacccaattcgccctatagtgagtcgtattacaattcactggccgtcgttttacaacgtcgtgactgggaaaaccctggcgttacccaacttaatcgccttgcagcacatccccctttcgccagctggcgtaatagcgaagaggcccgcaccgatcgcccttcccaacagttgcgcagcctgaatggcgaatggaaattgtaagcgttaatattttgttaaaattcgcgttaaatttttgttaaatcagctcattttttaaccaataggccgaaatcggcaaaatcccttataaatcaaaagaatagaccgagatagggttgagtgttgttccagtttggaacaagagtccactattaaagaacgtggactccaacgtcaaagggcgaaaaaccgtctatcagggcgatggcccactacgtgaaccatcaccctaatcaagttttttggggtcgaggtgccgtaaagcactaaatcggaaccctaaagggagcccccgatttagagcttgacggggaaagccggcgaacgtggcgagaaaggaagggaagaaagcgaaaggagcgggcgctagggcgctggcaagtgtagcggtcacgctgcgcgtaaccaccacacccgccgcgcttaatgcgccgctacagggcgcgtcaggtg

SEQ ID NO: 3028 - DNA, 4376 bp, Artificial Sequence
  Synthetic Construct, AS-28 intein modified protein encoding nucleic acids in pBluescript
gcacttttcggggaaatgtgcgcggaacccctatttgtttatttttctaaatacattcaaatatgtatccgctcatgagacaataaccctgataaatgcttcaataatattgaaaaaggaagagtatgagtattcaacatttccgtgtcgcccttattcccttttttgcggcattttgccttcctgtttttgctcacccagaaacgctggtgaaagtaaaagatgctgaagatcagttgggtgcacgagtgggttacatcgaactggatctcaacagcggtaagatccttgagagttttcgccccgaagaacgttttccaatgatgagcacttttaaagttctgctatgtggcgcggtattatcccgtattgacgccgggcaagagcaactcggtcgccgcatacactattctcagaatgacttggttgagtactcaccagtcacagaaaagcatcttacggatggcatgacagtaagagaattatgcagtgctgccataaccatgagtgataacactgcggccaacttacttctgacaacgatcggaggaccgaaggagctaaccgcttttttgcacaacatgggggatcatgtaactcgccttgatcgttgggaaccggagctgaatgaagccataccaaacgacgagcgtgacaccacgatgcctgtagcaatggcaacaacgttgcgcaaactattaactggcgaactacttactctagcttcccggcaacaattaatagactggatggaggcggataaagttgcaggaccacttctgcgctcggcccttccggctggctggtttattgctgataaatctggagccggtgagcgtgggtctcgcggtatcattgcagcactggggccagatggtaagccctcccgtatcgtagttatctacacgacggggagtcaggcaactatggatgaacgaaatagacagatcgctgagataggtgcctcactgattaagcattggtaactgtcagaccaagtttactcatatatactttagattgatttaaaacttcatttttaatttaaaaggatctaggtgaagatcctttttgataatctcatgaccaaaatcccttaacgtgagttttcgttccactgagcgtcagaccccgtagaaaagatcaaaggatcttcttgagatcctttttttctgcgcgtaatctgctgcttgcaaacaaaaaaaccaccgctaccagcggtggtttgtttgccggatcaagagctaccaactctttttccgaaggtaactggcttcagcagagcgcagataccaaatactgtccttctagtgtagccgtagttaggccaccacttcaagaactctgtagcaccgcctacatacctcgctctgctaatcctgttaccagtggctgctgccagtggcgataagtcgtgtcttaccgggttggactcaagacgatagttaccggataaggcgcagcggtcgggctgaacggggggttcgtgcacacagcccagcttggagcgaacgacctacaccgaactgagatacctacagcgtgagctatgagaaagcgccacgcttcccgaagggagaaaggcggacaggtatccggtaagcggcagggtcggaacaggagagcgcacgagggagcttccagggggaaacgcctggtatctttatagtcctgtcgggtttcgccacctctgacttgagcgtcgatttttgtgatgctcgtcaggggggcggagcctatggaaaaacgccagcaacgcggcctttttacggttcctggccttttgctggccttttgctcacatgttctttcctgcgttatcccctgattctgtggataaccgtattaccgcctttgagtgagctgataccgctcgccgcagccgaacgaccgagcgcagcgagtcagtgagcgaggaagcggaagagcgcccaatacgcaaaccgcctctccccgcgcgttggccgattcattaatgcagctggcacgacaggtttcccgactggaaagcgggcagtgagcgcaacgcaattaatgtgagttagctcactcattaggcaccccaggctttacactttatgcttccggctcgtatgttgtgtggaattgtgagcggataacaatttcacacaggaaacagcatatgcaaacaagcattactctgacatccaacgcatccggtacgtttgacggttactattacgaactctggaaggatactggcaatacaacaatgacggtctacactcaaggtcgcttttcctgccagtggtcgaacatcaataacgcgttgtttaggaccgggaagaaatacaaccagaattggcagtctcttggcacaatccggatcacgtactctgcgacttacaacccaaacgggaactcctacttgtgtatctatggctggtctaccaacccattggtcgagttctacatcgttgagtcctgggggaactggagaccgcctggtgccacgtccctgggccaagtgacaatcgatggcgggacctacgacatctataggacgacacgcgtcaaccagccttgcgtgcggggggacactacggtcgctctcgctgacgggtcggagcgggagattcgggatctcgtggaggctaatctggatgaccctcggccagttgacgatggggtgtgggacggcgtggatgtcgctgttccttccctcgctgctgacggcaggctggttcagcgcagggcgacaaaagtgtggaagcgggaggctccggagacaatgtaccgggtccgcactgctgctggccacaggctcaccgtcacgccatcgcatcctctgttcgtggctgggtctcacggcccagacgccgtcaggacggaggacctggaggttgggcagctggtgggcgtcgccccggacggcgatgggtcgggccaggtcgctccagacggcggggttatcagggatgctcagccagctccagtgggcgacgctgagaccgtcgcctggtccgcgatcgagagcattacggaggtcgagccggatgaggagtgggtgtacgatctggaggtggagggcactcattcatacctcacggatggggtcgtttcacacaactccattgtggggacagccacgttcgatcagtactggagcgtgcgcacctctaagcggacttcaggaacagtgaccgtgaccgatcacttccgcgcctgggcgaaccggggcctgaacctcggcacaatagaccaaattacattgtgcgtggagggttaccaaagctctggatcagccaacatcacccagaacaccttctctcagggctcttcttccggcagttcgggtggctcatccggctccacaacgactactcgcatcgagtgtgagaacatgtccttgtccggaccctacgttagcaggatcaccaatccctttaatggtattgcgctgtacgccaacggagacacagcccgcgctaccgttaacttccccgcaagtcgcaactacaatttccgcctgcggggttgcggcaacaacaataatcttgcccgtgtggacctgaggatcgacggacggaccgtcgggaccttttattaccagggcacatacccctgggaggccccaattgacaatgtttatgtcagtgcggggagtcatacagtcgaaatcactgttactgcggataacggcacatgggacgtgtatgccgactacctggtgatacagtgactcgagggggggcccggtacccaattcgccctatagtgagtcgtattacaattcactggccgtcgttttacaacgtcgtgactgggaaaaccctggcgttacccaacttaatcgccttgcagcacatccccctttcgccagctggcgtaatagcgaagaggcccgcaccgatcgcccttcccaacagttgcgcagcctgaatggcgaatggaaattgtaagcgttaatattttgttaaaattcgcgttaaatttttgttaaatcagctcattttttaaccaataggccgaaatcggcaaaatcccttataaatcaaaagaatagaccgagatagggttgagtgttgttccagtttggaacaagagtccactattaaagaacgtggactccaacgtcaaagggcgaaaaaccgtctatcagggcgatggcccactacgtgaaccatcaccctaatcaagttttttggggtcgaggtgccgtaaagcactaaatcggaaccctaaagggagcccccgatttagagcttgacggggaaagccggcgaacgtggcgagaaaggaagggaagaaagcgaaaggagcgggcgctagggcgctggcaagtgtagcggtcacgctgcgcgtaaccaccacacccgccgcgcttaatgcgccgctacagggcgcgtcaggtg

SEQ ID NO: 3029 - DNA, 5141 bp, Artificial Sequence
  Synthetic Construct, AS-29 intein modified protein encoding nucleic acids in pBluescript
gcacttttcggggaaatgtgcgcggaacccctatttgtttatttttctaaatacattcaaatatgtatccgctcatgagacaataaccctgataaatgcttcaataatattgaaaaaggaagagtatgagtattcaacatttccgtgtcgcccttattcccttttttgcggcattttgccttcctgtttttgctcacccagaaacgctggtgaaagtaaaagatgctgaagatcagttgggtgcacgagtgggttacatcgaactggatctcaacagcggtaagatccttgagagttttcgccccgaagaacgttttccaatgatgagcacttttaaagttctgctatgtggcgcggtattatcccgtattgacgccgggcaagagcaactcggtcgccgcatacactattctcagaatgacttggttgagtactcaccagtcacagaaaagcatcttacggatggcatgacagtaagagaattatgcagtgctgccataaccatgagtgataacactgcggccaacttacttctgacaacgatcggaggaccgaaggagctaaccgcttttttgcacaacatgggggatcatgtaactcgccttgatcgttgggaaccggagctgaatgaagccataccaaacgacgagcgtgacaccacgatgcctgtagcaatggcaacaacgttgcgcaaactattaactggcgaactacttactctagcttcccggcaacaattaatagactggatggaggcggataaagttgcaggaccacttctgcgctcggcccttccggctggctggtttattgctgataaatctggagccggtgagcgtgggtctcgcggtatcattgcagcactggggccagatggtaagccctcccgtatcgtagttatctacacgacggggagtcaggcaactatggatgaacgaaatagacagatcgctgagataggtgcctcactgattaagcattggtaactgtcagaccaagtttactcatatatactttagattgatttaaaacttcatttttaatttaaaaggatctaggtgaagatcctttttgataatctcatgaccaaaatcccttaacgtgagttttcgttccactgagcgtcagaccccgtagaaaagatcaaaggatcttcttgagatcctttttttctgcgcgtaatctgctgcttgcaaacaaaaaaaccaccgctaccagcggtggtttgtttgccggatcaagagctaccaactctttttccgaaggtaactggcttcagcagagcgcagataccaaatactgtccttctagtgtagccgtagttaggccaccacttcaagaactctgtagcaccgcctacatacctcgctctgctaatcctgttaccagtggctgctgccagtggcgataagtcgtgtcttaccgggttggactcaagacgatagttaccggataaggcgcagcggtcgggctgaacggggggttcgtgcacacagcccagcttggagcgaacgacctacaccgaactgagatacctacagcgtgagctatgagaaagcgccacgcttcccgaagggagaaaggcggacaggtatccggtaagcggcagggtcggaacaggagagcgcacgagggagcttccagggggaaacgcctggtatctttatagtcctgtcgggtttcgccacctctgacttgagcgtcgatttttgtgatgctcgtcaggggggcggagcctatggaaaaacgccagcaacgcggcctttttacggttcctggccttttgctggccttttgctcacatgttctttcctgcgttatcccctgattctgtggataaccgtattaccgcctttgagtgagctgataccgctcgccgcagccgaacgaccgagcgcagcgagtcagtgagcgaggaagcggaagagcgcccaatacgcaaaccgcctctccccgcgcgttggccgattcattaatgcagctggcacgacaggtttcccgactggaaagcgggcagtgagcgcaacgcaattaatgtgagttagctcactcattaggcaccccaggctttacactttatgcttccggctcgtatgttgtgtggaattgtgagcggataacaatttcacacaggaaacagcatatgcaaacaagcattactctgacatccaacgcatccggtacgtttgacggttactattacgaactctggaaggatactggcaatacaacaatgacggtctacactcaaggtcgcttttcctgccagtggtcgaacatcaataacgcgttgtttaggaccgggaagaaatacaaccagaattggcagtctcttggcacaatccggatcacgtactctgcgacttacaacccaaacgggaactcctacttgtgtatctatggctggtctaccaacccattggtcgagttctacatcgttgagtcctgggggaactggagaccgcctggtgccacgtccctgggccaagtgacaatcgatggcgggacctacgacatctataggacgacacgcgtcaaccagccttcagttacgggggacaggccagtggtcgttagggatccggggggcacagttcgcattctcccaattgaggatctcttcgctagggggaccacggagtcagaggtcctcatcgctgctgacggcgatgtggtcgcttccgctacaccaggcaagactaggagggctctcgacgggtgggatgctctgtccgtgaacgaggacggcgaggctgagtggcagccaatcgcgcaggctattcggcacaacaccgacaagcctgttgtgaatctccagcataagttcggcgagtcaacaactacccgcgaccactcctacgtcgttccaggcgaggatgggctgacgacagtttccccagacgatgtggctgagccttaccgcgtcagcggcgttccagacgtggagcccgtcgagcaggtggatgtctacgaggttctcaggggctacgagagggagtacgaggacggcaggtcggtggggtctgataactcaatcacaaagaggaagcagattcacgcggacgatgagtatgtgtggttcggccatgagcaccatagggacgttgattcgaccgttaaggtgaagcggttcgtggacatcgattctgaggacggcgctgctctgattaggctcctgggggcctacgtcccagagggctccgccagcaccggggagactgcgaccagcaagttcggcgcttcgctcgctgagtctgacagggagtggctcgctcagctgcagagggattacagccggctgttcgagaatactaccgctggcatcattacatcggacaggagggctgagaggactgtggagtaccagacggacacaggcggggcttcggtcacctacaacgatgagacgctcaagctgcagatgatgaatgagctcgcggctgtgttcttcagggagttcgctggccagacgagcagggggaagcggatcccgtcgttcgtcttccacctgcccgaggagaagcaggacctcttcctgaccctcctggtggagggcgatgggagccgcgagttcccaaggtacacggaggcctacgcgcagcggaacttcgacttcgagacgacatctcgcgagctcgctgctggcctgtcaatgctcctgacgcagagggggcagaagcattctctcaagtaccgggactccaaggatagctacactatccgcacctgctccacgtacagggagggcagggacccagtcctgaccgaggctgaccacgatggctacgtgtacgacctctcagtggaggagaatgagaacttcgtggatggggttgggggcatcgtgctgcataattccattgtggggacagccacgttcgatcagtactggagcgtgcgcacctctaagcggacttcaggaacagtgaccgtgaccgatcacttccgcgcctgggcgaaccggggcctgaacctcggcacaatagaccaaattacattgtgcgtggagggttaccaaagctctggatcagccaacatcacccagaacaccttctctcagggctcttcttccggcagttcgggtggctcatccggctccacaacgactactcgcatcgagtgtgagaacatgtccttgtccggaccctacgttagcaggatcaccaatccctttaatggtattgcgctgtacgccaacggagacacagcccgcgctaccgttaacttccccgcaagtcgcaactacaatttccgcctgcggggttgcggcaacaacaataatcttgcccgtgtggacctgaggatcgacggacggaccgtcgggaccttttattaccagggcacatacccctgggaggccccaattgacaatgtttatgtcagtgcggggagtcatacagtcgaaatcactgttactgcggataacggcacatgggacgtgtatgccgactacctggtgatacagtgactcgagggggggcccggtacccaattcgccctatagtgagtcgtattacaattcactggccgtcgttttacaacgtcgtgactgggaaaaccctggcgttacccaacttaatcgccttgcagcacatccccctttcgccagctggcgtaatagcgaagaggcccgcaccgatcgcccttcccaacagttgcgcagcctgaatggcgaatggaaattgtaagcgttaatattttgttaaaattcgcgttaaatttttgttaaatcagctcattttttaaccaataggccgaaatcggcaaaatcccttataaatcaaaagaatagaccgagatagggttgagtgttgttccagtttggaacaagagtccactattaaagaacgtggactccaacgtcaaagggcgaaaaaccgtctatcagggcgatggcccactacgtgaaccatcaccctaatcaagttttttggggtcgaggtgccgtaaagcactaaatcggaaccctaaagggagcccccgatttagagcttgacggggaaagccggcgaacgtggcgagaaaggaagggaagaaagcgaaaggagcgggcgctagggcgctggcaagtgtagcggtcacgctgcgcgtaaccaccacacccgccgcgcttaatgcgccgctacagggcgcgtcaggtg

SEQ ID NO: 3030 - DNA, 4475 bp, Artificial Sequence
  Synthetic Construct, AS-30 intein modified protein encoding nucleic acids in pBluescript
gcacttttcggggaaatgtgcgcggaacccctatttgtttatttttctaaatacattcaaatatgtatccgctcatgagacaataaccctgataaatgcttcaataatattgaaaaaggaagagtatgagtattcaacatttccgtgtcgcccttattcccttttttgcggcattttgccttcctgtttttgctcacccagaaacgctggtgaaagtaaaagatgctgaagatcagttgggtgcacgagtgggttacatcgaactggatctcaacagcggtaagatccttgagagttttcgccccgaagaacgttttccaatgatgagcacttttaaagttctgctatgtggcgcggtattatcccgtattgacgccgggcaagagcaactcggtcgccgcatacactattctcagaatgacttggttgagtactcaccagtcacagaaaagcatcttacggatggcatgacagtaagagaattatgcagtgctgccataaccatgagtgataacactgcggccaacttacttctgacaacgatcggaggaccgaaggagctaaccgcttttttgcacaacatgggggatcatgtaactcgccttgatcgttgggaaccggagctgaatgaagccataccaaacgacgagcgtgacaccacgatgcctgtagcaatggcaacaacgttgcgcaaactattaactggcgaactacttactctagcttcccggcaacaattaatagactggatggaggcggataaagttgcaggaccacttctgcgctcggcccttccggctggctggtttattgctgataaatctggagccggtgagcgtgggtctcgcggtatcattgcagcactggggccagatggtaagccctcccgtatcgtagttatctacacgacggggagtcaggcaactatggatgaacgaaatagacagatcgctgagataggtgcctcactgattaagcattggtaactgtcagaccaagtttactcatatatactttagattgatttaaaacttcatttttaatttaaaaggatctaggtgaagatcctttttgataatctcatgaccaaaatcccttaacgtgagttttcgttccactgagcgtcagaccccgtagaaaagatcaaaggatcttcttgagatcctttttttctgcgcgtaatctgctgcttgcaaacaaaaaaaccaccgctaccagcggtggtttgtttgccggatcaagagctaccaactctttttccgaaggtaactggcttcagcagagcgcagataccaaatactgtccttctagtgtagccgtagttaggccaccacttcaagaactctgtagcaccgcctacatacctcgctctgctaatcctgttaccagtggctgctgccagtggcgataagtcgtgtcttaccgggttggactcaagacgatagttaccggataaggcgcagcggtcgggctgaacggggggttcgtgcacacagcccagcttggagcgaacgacctacaccgaactgagatacctacagcgtgagctatgagaaagcgccacgcttcccgaagggagaaaggcggacaggtatccggtaagcggcagggtcggaacaggagagcgcacgagggagcttccagggggaaacgcctggtatctttatagtcctgtcgggtttcgccacctctgacttgagcgtcgatttttgtgatgctcgtcaggggggcggagcctatggaaaaacgccagcaacgcggcctttttacggttcctggccttttgctggccttttgctcacatgttctttcctgcgttatcccctgattctgtggataaccgtattaccgcctttgagtgagctgataccgctcgccgcagccgaacgaccgagcgcagcgagtcagtgagcgaggaagcggaagagcgcccaatacgcaaaccgcctctccccgcgcgttggccgattcattaatgcagctggcacgacaggtttcccgactggaaagcgggcagtgagcgcaacgcaattaatgtgagttagctcactcattaggcaccccaggctttacactttatgcttccggctcgtatgttgtgtggaattgtgagcggataacaatttcacacaggaaacagcatatgcaaacaagcattactctgacatccaacgcatccggtacgtttgacggttactattacgaactctggaaggatactggcaatacaacaatgacggtctacactcaaggtcgcttttcctgccagtggtcgaacatcaataacgcgttgtttaggaccgggaagaaatacaaccagaattggcagtctcttggcacaatccggatcacgtactctgcgacttacaacccaaacgggaactcctacttgtgtatctatggctggtctaccaacccattggtcgagttctacatcgttgagtcctgggggaactggagaccgcctggtgccacgtccctgggccaagtgacaatcgatggcgggacctacgacatctataggacgacacgcgtcaaccagccttgcttctcgggggatacggagatcgctctcgcttcgggggattctattactttcgagtcgctggtggacgcttacgagcggggggagacacactactgctacactatcggcgacgatgggcggatccgcattgaggagattatgaacccgcgggtgacccaggaggacgctgctctcctggccgttacgctcgataatggcgaggtcatcaggtgcacacccgaccatgagttcatgctccgggatggcaactactgcgaggcgcagaatctgaccgacgggcagagcctcatgccactgtacaggaccacgacagagatgactgagactaccgagacgacagagactaccgggacagctgagatggtgaagcagccgttcgcccagaacaattgggagtccgtcagccagctcgctaaccgctacaatcgcaggcacacgacaactgaccatatcgttgagacgcagcagattcagtcacagcagcagtcccagatcgagaccgtccagatttctgagagggcggacgttcacaaccataccgtgatctcggtcgagtctctgaccgagacggctgatgtctacgatctggaggttccagttactcataatttcgctctcgcttccggggttttcgttcataattccattgtggggacagccacgttcgatcagtactggagcgtgcgcacctctaagcggacttcaggaacagtgaccgtgaccgatcacttccgcgcctgggcgaaccggggcctgaacctcggcacaatagaccaaattacattgtgcgtggagggttaccaaagctctggatcagccaacatcacccagaacaccttctctcagggctcttcttccggcagttcgggtggctcatccggctccacaacgactactcgcatcgagtgtgagaacatgtccttgtccggaccctacgttagcaggatcaccaatccctttaatggtattgcgctgtacgccaacggagacacagcccgcgctaccgttaacttccccgcaagtcgcaactacaatttccgcctgcggggttgcggcaacaacaataatcttgcccgtgtggacctgaggatcgacggacggaccgtcgggaccttttattaccagggcacatacccctgggaggccccaattgacaatgtttatgtcagtgcggggagtcatacagtcgaaatcactgttactgcggataacggcacatgggacgtgtatgccgactacctggtgatacagtgactcgagggggggcccggtacccaattcgccctatagtgagtcgtattacaattcactggccgtcgttttacaacgtcgtgactgggaaaaccctggcgttacccaacttaatcgccttgcagcacatccccctttcgccagctggcgtaatagcgaagaggcccgcaccgatcgcccttcccaacagttgcgcagcctgaatggcgaatggaaattgtaagcgttaatattttgttaaaattcgcgttaaatttttgttaaatcagctcattttttaaccaataggccgaaatcggcaaaatcccttataaatcaaaagaatagaccgagatagggttgagtgttgttccagtttggaacaagagtccactattaaagaacgtggactccaacgtcaaagggcgaaaaaccgtctatcagggcgatggcccactacgtgaaccatcaccctaatcaagttttttggggtcgaggtgccgtaaagcactaaatcggaaccctaaagggagcccccgatttagagcttgacggggaaagccggcgaacgtggcgagaaaggaagggaagaaagcgaaaggagcgggcgctagggcgctggcaagtgtagcggtcacgctgcgcgtaaccaccacacccgccgcgcttaatgcgccgctacagggcgcgtcaggtg

SEQ ID NO: 3031 - DNA, 4457 bp, Artificial Sequence
  Synthetic Construct, AS-31 intein modified protein encoding nucleic acids in pBluescript
gcacttttcggggaaatgtgcgcggaacccctatttgtttatttttctaaatacattcaaatatgtatccgctcatgagacaataaccctgataaatgcttcaataatattgaaaaaggaagagtatgagtattcaacatttccgtgtcgcccttattcccttttttgcggcattttgccttcctgtttttgctcacccagaaacgctggtgaaagtaaaagatgctgaagatcagttgggtgcacgagtgggttacatcgaactggatctcaacagcggtaagatccttgagagttttcgccccgaagaacgttttccaatgatgagcacttttaaagttctgctatgtggcgcggtattatcccgtattgacgccgggcaagagcaactcggtcgccgcatacactattctcagaatgacttggttgagtactcaccagtcacagaaaagcatcttacggatggcatgacagtaagagaattatgcagtgctgccataaccatgagtgataacactgcggccaacttacttctgacaacgatcggaggaccgaaggagctaaccgcttttttgcacaacatgggggatcatgtaactcgccttgatcgttgggaaccggagctgaatgaagccataccaaacgacgagcgtgacaccacgatgcctgtagcaatggcaacaacgttgcgcaaactattaactggcgaactacttactctagcttcccggcaacaattaatagactggatggaggcggataaagttgcaggaccacttctgcgctcggcccttccggctggctggtttattgctgataaatctggagccggtgagcgtgggtctcgcggtatcattgcagcactggggccagatggtaagccctcccgtatcgtagttatctacacgacggggagtcaggcaactatggatgaacgaaatagacagatcgctgagataggtgcctcactgattaagcattggtaactgtcagaccaagtttactcatatatactttagattgatttaaaacttcatttttaatttaaaaggatctaggtgaagatcctttttgataatctcatgaccaaaatcccttaacgtgagttttcgttccactgagcgtcagaccccgtagaaaagatcaaaggatcttcttgagatcctttttttctgcgcgtaatctgctgcttgcaaacaaaaaaaccaccgctaccagcggtggtttgtttgccggatcaagagctaccaactctttttccgaaggtaactggcttcagcagagcgcagataccaaatactgtccttctagtgtagccgtagttaggccaccacttcaagaactctgtagcaccgcctacatacctcgctctgctaatcctgttaccagtggctgctgccagtggcgataagtcgtgtcttaccgggttggactcaagacgatagttaccggataaggcgcagcggtcgggctgaacggggggttcgtgcacacagcccagcttggagcgaacgacctacaccgaactgagatacctacagcgtgagctatgagaaagcgccacgcttcccgaagggagaaaggcggacaggtatccggtaagcggcagggtcggaacaggagagcgcacgagggagcttccagggggaaacgcctggtatctttatagtcctgtcgggtttcgccacctctgacttgagcgtcgatttttgtgatgctcgtcaggggggcggagcctatggaaaaacgccagcaacgcggcctttttacggttcctggccttttgctggccttttgctcacatgttctttcctgcgttatcccctgattctgtggataaccgtattaccgcctttgagtgagctgataccgctcgccgcagccgaacgaccgagcgcagcgagtcagtgagcgaggaagcggaagagcgcccaatacgcaaaccgcctctccccgcgcgttggccgattcattaatgcagctggcacgacaggtttcccgactggaaagcgggcagtgagcgcaacgcaattaatgtgagttagctcactcattaggcaccccaggctttacactttatgcttccggctcgtatgttgtgtggaattgtgagcggataacaatttcacacaggaaacagcatatgcaaacaagcattactctgacatccaacgcatccggtacgtttgacggttactattacgaactctggaaggatactggcaatacaacaatgacggtctacactcaaggtcgcttttcctgccagtggtcgaacatcaataacgcgttgtttaggaccgggaagaaatacaaccagaattggcagtctcttggcacaatccggatcacgtactctgcgacttacaacccaaacgggaactcctacttgtgtatctatggctggtctaccaacccattggtcgagttctacatcgttgagtcctgggggaactggagaccgcctggtgccacgtccctgggccaagtgacaatcgatggcgggacctacgacatctataggacgacacgcgtcaaccagccttgcgtttcgggggagacagacatcgctctcgtggagggcaagaccgctactatcggggagctcgtggagtcggcgctgacagacccaaagccggttgacgatggcgtgtgggacaccgcggatttcaccgtgacgtcggctatcgagacgggcgagctcattgagcgggacgtcacacgcgtttggaagaggcagtcccccgagacgatgcggcagatccagattgctggcgggaggagcgtgacagtcactccatcgcaccccgttttcgtggagcataatgggtcttacaccgctaggagggctgactccctgagcgctggcgagtcagtggctatcgctgacgatgtcgccgactcacacccgatttccgtcgataacactgcgaataccctcaacccaaggtcgatgtctacgcctggcatcaccacggacggcgggctgtacaggacagggtccgatggcgggattgtccatgccgaggttggcaaggaggacgttactgattgcctcacaactgacaggatcaccgctgtgaagaccgtcacgccaacagctgagtgggtctacgatctggaggtggagggcacacacgcctacctcacaaacggggttctctcacacaactccattgtggggacagccacgttcgatcagtactggagcgtgcgcacctctaagcggacttcaggaacagtgaccgtgaccgatcacttccgcgcctgggcgaaccggggcctgaacctcggcacaatagaccaaattacattgtgcgtggagggttaccaaagctctggatcagccaacatcacccagaacaccttctctcagggctcttcttccggcagttcgggtggctcatccggctccacaacgactactcgcatcgagtgtgagaacatgtccttgtccggaccctacgttagcaggatcaccaatccctttaatggtattgcgctgtacgccaacggagacacagcccgcgctaccgttaacttccccgcaagtcgcaactacaatttccgcctgcggggttgcggcaacaacaataatcttgcccgtgtggacctgaggatcgacggacggaccgtcgggaccttttattaccagggcacatacccctgggaggccccaattgacaatgtttatgtcagtgcggggagtcatacagtcgaaatcactgttactgcggataacggcacatgggacgtgtatgccgactacctggtgatacagtgactcgagggggggcccggtacccaattcgccctatagtgagtcgtattacaattcactggccgtcgttttacaacgtcgtgactgggaaaaccctggcgttacccaacttaatcgccttgcagcacatccccctttcgccagctggcgtaatagcgaagaggcccgcaccgatcgcccttcccaacagttgcgcagcctgaatggcgaatggaaattgtaagcgttaatattttgttaaaattcgcgttaaatttttgttaaatcagctcattttttaaccaataggccgaaatcggcaaaatcccttataaatcaaaagaatagaccgagatagggttgagtgttgttccagtttggaacaagagtccactattaaagaacgtggactccaacgtcaaagggcgaaaaaccgtctatcagggcgatggcccactacgtgaaccatcaccctaatcaagttttttggggtcgaggtgccgtaaagcactaaatcggaaccctaaagggagcccccgatttagagcttgacggggaaagccggcgaacgtggcgagaaaggaagggaagaaagcgaaaggagcgggcgctagggcgctggcaagtgtagcggtcacgctgcgcgtaaccaccacacccgccgcgcttaatgcgccgctacagggcgcgtcaggtg

SEQ ID NO: 3032 - DNA, 5546 bp, Artificial Sequence
  Synthetic Construct, AS-32 intein modified protein encoding nucleic acids in pBluescript
gcacttttcggggaaatgtgcgcggaacccctatttgtttatttttctaaatacattcaaatatgtatccgctcatgagacaataaccctgataaatgcttcaataatattgaaaaaggaagagtatgagtattcaacatttccgtgtcgcccttattcccttttttgcggcattttgccttcctgtttttgctcacccagaaacgctggtgaaagtaaaagatgctgaagatcagttgggtgcacgagtgggttacatcgaactggatctcaacagcggtaagatccttgagagttttcgccccgaagaacgttttccaatgatgagcacttttaaagttctgctatgtggcgcggtattatcccgtattgacgccgggcaagagcaactcggtcgccgcatacactattctcagaatgacttggttgagtactcaccagtcacagaaaagcatcttacggatggcatgacagtaagagaattatgcagtgctgccataaccatgagtgataacactgcggccaacttacttctgacaacgatcggaggaccgaaggagctaaccgcttttttgcacaacatgggggatcatgtaactcgccttgatcgttgggaaccggagctgaatgaagccataccaaacgacgagcgtgacaccacgatgcctgtagcaatggcaacaacgttgcgcaaactattaactggcgaactacttactctagcttcccggcaacaattaatagactggatggaggcggataaagttgcaggaccacttctgcgctcggcccttccggctggctggtttattgctgataaatctggagccggtgagcgtgggtctcgcggtatcattgcagcactggggccagatggtaagccctcccgtatcgtagttatctacacgacggggagtcaggcaactatggatgaacgaaatagacagatcgctgagataggtgcctcactgattaagcattggtaactgtcagaccaagtttactcatatatactttagattgatttaaaacttcatttttaatttaaaaggatctaggtgaagatcctttttgataatctcatgaccaaaatcccttaacgtgagttttcgttccactgagcgtcagaccccgtagaaaagatcaaaggatcttcttgagatcctttttttctgcgcgtaatctgctgcttgcaaacaaaaaaaccaccgctaccagcggtggtttgtttgccggatcaagagctaccaactctttttccgaaggtaactggcttcagcagagcgcagataccaaatactgtccttctagtgtagccgtagttaggccaccacttcaagaactctgtagcaccgcctacatacctcgctctgctaatcctgttaccagtggctgctgccagtggcgataagtcgtgtcttaccgggttggactcaagacgatagttaccggataaggcgcagcggtcgggctgaacggggggttcgtgcacacagcccagcttggagcgaacgacctacaccgaactgagatacctacagcgtgagctatgagaaagcgccacgcttcccgaagggagaaaggcggacaggtatccggtaagcggcagggtcggaacaggagagcgcacgagggagcttccagggggaaacgcctggtatctttatagtcctgtcgggtttcgccacctctgacttgagcgtcgatttttgtgatgctcgtcaggggggcggagcctatggaaaaacgccagcaacgcggcctttttacggttcctggccttttgctggccttttgctcacatgttctttcctgcgttatcccctgattctgtggataaccgtattaccgcctttgagtgagctgataccgctcgccgcagccgaacgaccgagcgcagcgagtcagtgagcgaggaagcggaagagcgcccaatacgcaaaccgcctctccccgcgcgttggccgattcattaatgcagctggcacgacaggtttcccgactggaaagcgggcagtgagcgcaacgcaattaatgtgagttagctcactcattaggcaccccaggctttacactttatgcttccggctcgtatgttgtgtggaattgtgagcggataacaatttcacacaggaaacagcatatgcaaacaagcattactctgacatccaacgcatccggtacgtttgacggttactattacgaactctggaaggatactggcaatacaacaatgacggtctacactcaaggtcgcttttcctgccagtggtcgaacatcaataacgcgttgtttaggaccgggaagaaatacaaccagaattggcagtctcttggcacaatccggatcacgtactctgcgacttacaacccaaacgggaactcctacttgtgtatctatggctggtctaccaacccattggtcgagttctacatcgttgagtcctgggggaactggagaccgcctggtgccacgtccctgggccaagtgacaatcgatggcgggacctacgacatctataggacgacacgcgtcaaccagccttcataccatcctaggtcggaggtcctgctcgctgacgggcagcggattgacatcggcactttcgtggattcgcgcattgagaagaataacgccaatgttatcgacggcattaactgcgagatcctgccggtggacgatattgatgtttacaccgtggacacagatactgggtccgctagcacggtttccattgacagggtgagccggcacccagctccatccgagttcatccgcgtgaagttcagcaacggcaggtcggttctcgtgaccccggagcatcccatgttcatcgacgatgggtcagagaccaagacggtccaggctaatgctctgagcggcggggagttcgttccagctcctcaccatctcccaggcgtgaacaccgacgcgtccagcgtctccgacgatatcaatgatgttagcaccattaggacgcacgtgaggtcccgggcgcgcgctaaggctgaggtcgaggttcgcgctacggacggcgagttcaagctcatcgatgccgcgcagaccctgggcatcattacggctgtggggaaggtgagcgtcgacgctccagagcggggcatcattgtcgacatggatcgcacagttgactcgtctaaggattcgatcaacaatgtcctggggtctgttattccttcaaacgacaatgattctatcactagggtccaggacacaggctcgactgggaaccagtggaggtggtctgtgaataccttcatcgagcggatgatcgagattgctccagctgtcacggctgacaggccaaacaggagggtgcctgatgctgtcctcggcgggagcgaggctgtggtccagcagttcctgacaggcgtgatcattgctgccgggcggatcctcgacgagactatccgcatctacgcttcatccaacgagctcgcctgcgactacgccgatgcgttcctcaggctgggcatcaccgcttccgtcgaggacgggccagctgagatcgcggctcagaccgtgatcaagtgcgacagcgattacgagcgcgcgtgcggcatgttcgacatcagctcgtctaggaccacgccctccgatacatcatcccagaacaatcagagctcggtcaccgcccagaacgaggacacgcaccagacaactagccatgagatcctcccgtcgggcattgcggatgagctgcagagcatcaggcagctcctgaacattcccgcctcggagcagctggcgtctatcacggctggcgacgatgggatcgcgctctcgattgctagggccgagatcaacctcctgcgggaccacattgagacactgcgcatggatactgagaatgtcagcattggccgcgacgattgcgttacaccgactatctcttcatccagcaagtacaagtacgcgaagaactcaatcacctccgacgagaatctccagctgttcggccagtcacaggcccagctgtccgagaggacaaagaccacggagtcgtcttcaatctcggcgtctactgacctcgtgtctatcccagctaacatttcagagaataggctcgtggctgctacacagaggctggacgaggtcgagactcgctgcaaccggcgctaccacagggtcatcgccgttgacacggtgtccaatgccggccctcatgcgtgcgagtgggtctacgatattactgtggagcctaccaacactttcatttcttccggggtcgttctgcataactccattgtggggacagccacgttcgatcagtactggagcgtgcgcacctctaagcggacttcaggaacagtgaccgtgaccgatcacttccgcgcctgggcgaaccggggcctgaacctcggcacaatagaccaaattacattgtgcgtggagggttaccaaagctctggatcagccaacatcacccagaacaccttctctcagggctcttcttccggcagttcgggtggctcatccggctccacaacgactactcgcatcgagtgtgagaacatgtccttgtccggaccctacgttagcaggatcaccaatccctttaatggtattgcgctgtacgccaacggagacacagcccgcgctaccgttaacttccccgcaagtcgcaactacaatttccgcctgcggggttgcggcaacaacaataatcttgcccgtgtggacctgaggatcgacggacggaccgtcgggaccttttattaccagggcacatacccctgggaggccccaattgacaatgtttatgtcagtgcggggagtcatacagtcgaaatcactgttactgcggataacggcacatgggacgtgtatgccgactacctggtgatacagtgactcgagggggggcccggtacccaattcgccctatagtgagtcgtattacaattcactggccgtcgttttacaacgtcgtgactgggaaaaccctggcgttacccaacttaatcgccttgcagcacatccccctttcgccagctggcgtaatagcgaagaggcccgcaccgatcgcccttcccaacagttgcgcagcctgaatggcgaatggaaattgtaagcgttaatattttgttaaaattcgcgttaaatttttgttaaatcagctcattttttaaccaataggccgaaatcggcaaaatcccttataaatcaaaagaatagaccgagatagggttgagtgttgttccagtttggaacaagagtccactattaaagaacgtggactccaacgtcaaagggcgaaaaaccgtctatcagggcgatggcccactacgtgaaccatcaccctaatcaagttttttggggtcgaggtgccgtaaagcactaaatcggaaccctaaagggagcccccgatttagagcttgacggggaaagccggcgaacgtggcgagaaaggaagggaagaaagcgaaaggagcgggcgctagggcgctggcaagtgtagcggtcacgctgcgcgtaaccaccacacccgccgcgcttaatgcgccgctacagggcgcgtcaggtg

SEQ ID NO: 3033 - DNA, 4904 bp, Artificial Sequence
  Synthetic Construct, AS-33 intein modified protein encoding nucleic acids in pBluescript
gcacttttcggggaaatgtgcgcggaacccctatttgtttatttttctaaatacattcaaatatgtatccgctcatgagacaataaccctgataaatgcttcaataatattgaaaaaggaagagtatgagtattcaacatttccgtgtcgcccttattcccttttttgcggcattttgccttcctgtttttgctcacccagaaacgctggtgaaagtaaaagatgctgaagatcagttgggtgcacgagtgggttacatcgaactggatctcaacagcggtaagatccttgagagttttcgccccgaagaacgttttccaatgatgagcacttttaaagttctgctatgtggcgcggtattatcccgtattgacgccgggcaagagcaactcggtcgccgcatacactattctcagaatgacttggttgagtactcaccagtcacagaaaagcatcttacggatggcatgacagtaagagaattatgcagtgctgccataaccatgagtgataacactgcggccaacttacttctgacaacgatcggaggaccgaaggagctaaccgcttttttgcacaacatgggggatcatgtaactcgccttgatcgttgggaaccggagctgaatgaagccataccaaacgacgagcgtgacaccacgatgcctgtagcaatggcaacaacgttgcgcaaactattaactggcgaactacttactctagcttcccggcaacaattaatagactggatggaggcggataaagttgcaggaccacttctgcgctcggcccttccggctggctggtttattgctgataaatctggagccggtgagcgtgggtctcgcggtatcattgcagcactggggccagatggtaagccctcccgtatcgtagttatctacacgacggggagtcaggcaactatggatgaacgaaatagacagatcgctgagataggtgcctcactgattaagcattggtaactgtcagaccaagtttactcatatatactttagattgatttaaaacttcatttttaatttaaaaggatctaggtgaagatcctttttgataatctcatgaccaaaatcccttaacgtgagttttcgttccactgagcgtcagaccccgtagaaaagatcaaaggatcttcttgagatcctttttttctgcgcgtaatctgctgcttgcaaacaaaaaaaccaccgctaccagcggtggtttgtttgccggatcaagagctaccaactctttttccgaaggtaactggcttcagcagagcgcagataccaaatactgtccttctagtgtagccgtagttaggccaccacttcaagaactctgtagcaccgcctacatacctcgctctgctaatcctgttaccagtggctgctgccagtggcgataagtcgtgtcttaccgggttggactcaagacgatagttaccggataaggcgcagcggtcgggctgaacggggggttcgtgcacacagcccagcttggagcgaacgacctacaccgaactgagatacctacagcgtgagctatgagaaagcgccacgcttcccgaagggagaaaggcggacaggtatccggtaagcggcagggtcggaacaggagagcgcacgagggagcttccagggggaaacgcctggtatctttatagtcctgtcgggtttcgccacctctgacttgagcgtcgatttttgtgatgctcgtcaggggggcggagcctatggaaaaacgccagcaacgcggcctttttacggttcctggccttttgctggccttttgctcacatgttctttcctgcgttatcccctgattctgtggataaccgtattaccgcctttgagtgagctgataccgctcgccgcagccgaacgaccgagcgcagcgagtcagtgagcgaggaagcggaagagcgcccaatacgcaaaccgcctctccccgcgcgttggccgattcattaatgcagctggcacgacaggtttcccgactggaaagcgggcagtgagcgcaacgcaattaatgtgagttagctcactcattaggcaccccaggctttacactttatgcttccggctcgtatgttgtgtggaattgtgagcggataacaatttcacacaggaaacagcatatgcaaacaagcattactctgacatccaacgcatccggtacgtttgacggttactattacgaactctggaaggatactggcaatacaacaatgacggtctacactcaaggtcgcttttcctgccagtggtcgaacatcaataacgcgttgtttaggaccgggaagaaatacaaccagaattggcagtctcttggcacaatccggatcacgtactctgcgacttacaacccaaacgggaactcctacttgtgtatctatggctggtctaccaacccattggtcgagttctacatcgttgagtcctgggggaactggagaccgcctggtgccacgtccctgggccaagtgacaatcgatggcgggacctacgacatctataggacgacacgcgtcaaccagccttgcttcactcctgatacaaatgttctgacgcctaatggggttcgcaatattcgggatctcacggtcggggattcggtttactcgctgaacccggagaccatgcagatggagatcaagccggtgacacagactcacgagtaccccgactaccagggcgacctcatcgatattcagacaaacgagatcgatttccgcgtcactccaaatcataggatgctggttgaggctaccggcacggacaccacgtccaccaacgactacgatttcatcgaggccgggaatctcgatatttccagccggtacgagctgcctcacggctggtccgttgaccatacggatagcctcggggcctacatcgacctgattaccctcctgagggagcagtcagacacgtacaacgtcctctccgatggcgggatgacaactgctgctacggctgacatcaatcacaacaatgtcacccgcagggttgactctgatacgttcgtgtcactgattggctggtatgtggctacagggcgggtctcgcgcactcagaacggctctgacagggtctacctccagctgtcccagacaaatactaaggcgcggacccagctcacgatgctcctggacgagctgggcgtggactggcaggctgataacgagaagatccacttcgtgtctcatgtctggacggagctcttcgacaccacgtgcggccgcacagagaagaacaagcacatcccggagctgattttcgacgcttcagcctcccagaagagggcgttcttcgatgctatcattaacggcagcggggtcaagaatgacgattcgtaccagtaccacacctcgtctgaggacctcagggacgatatcctccggctgtgcgttcatatcggcattgtggcgcggtacgactacatcaacgatgagtcctggcgcattgagtgcaccgagacggccaatcccgacttcacactgactcatagcggcaggcagtcgacagctgaggatggggtttactgcgtgactgtggcggataatcagactctgctcgccgggaggaatggcaccttccagtggacaggcaactccattgtggggacagccacgttcgatcagtactggagcgtgcgcacctctaagcggacttcaggaacagtgaccgtgaccgatcacttccgcgcctgggcgaaccggggcctgaacctcggcacaatagaccaaattacattgtgcgtggagggttaccaaagctctggatcagccaacatcacccagaacaccttctctcagggctcttcttccggcagttcgggtggctcatccggctccacaacgactactcgcatcgagtgtgagaacatgtccttgtccggaccctacgttagcaggatcaccaatccctttaatggtattgcgctgtacgccaacggagacacagcccgcgctaccgttaacttccccgcaagtcgcaactacaatttccgcctgcggggttgcggcaacaacaataatcttgcccgtgtggacctgaggatcgacggacggaccgtcgggaccttttattaccagggcacatacccctgggaggccccaattgacaatgtttatgtcagtgcggggagtcatacagtcgaaatcactgttactgcggataacggcacatgggacgtgtatgccgactacctggtgatacagtgactcgagggggggcccggtacccaattcgccctatagtgagtcgtattacaattcactggccgtcgttttacaacgtcgtgactgggaaaaccctggcgttacccaacttaatcgccttgcagcacatccccctttcgccagctggcgtaatagcgaagaggcccgcaccgatcgcccttcccaacagttgcgcagcctgaatggcgaatggaaattgtaagcgttaatattttgttaaaattcgcgttaaatttttgttaaatcagctcattttttaaccaataggccgaaatcggcaaaatcccttataaatcaaaagaatagaccgagatagggttgagtgttgttccagtttggaacaagagtccactattaaagaacgtggactccaacgtcaaagggcgaaaaaccgtctatcagggcgatggcccactacgtgaaccatcaccctaatcaagttttttggggtcgaggtgccgtaaagcactaaatcggaaccctaaagggagcccccgatttagagcttgacggggaaagccggcgaacgtggcgagaaaggaagggaagaaagcgaaaggagcgggcgctagggcgctggcaagtgtagcggtcacgctgcgcgtaaccaccacacccgccgcgcttaatgcgccgctacagggcgcgtcaggtg

SEQ ID NO: 3034 - DNA, 5417 bp, Artificial Sequence
  Synthetic Construct, AS-34 intein modified protein encoding nucleic acids in pBluescript
gcacttttcggggaaatgtgcgcggaacccctatttgtttatttttctaaatacattcaaatatgtatccgctcatgagacaataaccctgataaatgcttcaataatattgaaaaaggaagagtatgagtattcaacatttccgtgtcgcccttattcccttttttgcggcattttgccttcctgtttttgctcacccagaaacgctggtgaaagtaaaagatgctgaagatcagttgggtgcacgagtgggttacatcgaactggatctcaacagcggtaagatccttgagagttttcgccccgaagaacgttttccaatgatgagcacttttaaagttctgctatgtggcgcggtattatcccgtattgacgccgggcaagagcaactcggtcgccgcatacactattctcagaatgacttggttgagtactcaccagtcacagaaaagcatcttacggatggcatgacagtaagagaattatgcagtgctgccataaccatgagtgataacactgcggccaacttacttctgacaacgatcggaggaccgaaggagctaaccgcttttttgcacaacatgggggatcatgtaactcgccttgatcgttgggaaccggagctgaatgaagccataccaaacgacgagcgtgacaccacgatgcctgtagcaatggcaacaacgttgcgcaaactattaactggcgaactacttactctagcttcccggcaacaattaatagactggatggaggcggataaagttgcaggaccacttctgcgctcggcccttccggctggctggtttattgctgataaatctggagccggtgagcgtgggtctcgcggtatcattgcagcactggggccagatggtaagccctcccgtatcgtagttatctacacgacggggagtcaggcaactatggatgaacgaaatagacagatcgctgagataggtgcctcactgattaagcattggtaactgtcagaccaagtttactcatatatactttagattgatttaaaacttcatttttaatttaaaaggatctaggtgaagatcctttttgataatctcatgaccaaaatcccttaacgtgagttttcgttccactgagcgtcagaccccgtagaaaagatcaaaggatcttcttgagatcctttttttctgcgcgtaatctgctgcttgcaaacaaaaaaaccaccgctaccagcggtggtttgtttgccggatcaagagctaccaactctttttccgaaggtaactggcttcagcagagcgcagataccaaatactgtccttctagtgtagccgtagttaggccaccacttcaagaactctgtagcaccgcctacatacctcgctctgctaatcctgttaccagtggctgctgccagtggcgataagtcgtgtcttaccgggttggactcaagacgatagttaccggataaggcgcagcggtcgggctgaacggggggttcgtgcacacagcccagcttggagcgaacgacctacaccgaactgagatacctacagcgtgagctatgagaaagcgccacgcttcccgaagggagaaaggcggacaggtatccggtaagcggcagggtcggaacaggagagcgcacgagggagcttccagggggaaacgcctggtatctttatagtcctgtcgggtttcgccacctctgacttgagcgtcgatttttgtgatgctcgtcaggggggcggagcctatggaaaaacgccagcaacgcggcctttttacggttcctggccttttgctggccttttgctcacatgttctttcctgcgttatcccctgattctgtggataaccgtattaccgcctttgagtgagctgataccgctcgccgcagccgaacgaccgagcgcagcgagtcagtgagcgaggaagcggaagagcgcccaatacgcaaaccgcctctccccgcgcgttggccgattcattaatgcagctggcacgacaggtttcccgactggaaagcgggcagtgagcgcaacgcaattaatgtgagttagctcactcattaggcaccccaggctttacactttatgcttccggctcgtatgttgtgtggaattgtgagcggataacaatttcacacaggaaacagcatatgcaaacaagcattactctgacatccaacgcatccggtacgtttgacggttactattacgaactctggaaggatactggcaatacaacaatgacggtctacactcaaggtcgcttttcctgccagtggtcgaacatcaataacgcgttgtttaggaccgggaagaaatacaaccagaattggcagtctcttggcacaatccggatcacgtactctgcgacttacaacccaaacgggaactcctacttgtgtatctatggctggtctaccaacccattggtcgagttctacatcgttgagtcctgggggaactggagaccgcctggtgccacgtccctgggccaagtgacaatcgatggcgggacctacgacatctataggacgacacgcgtcaaccagccttgcttccatcctgagactaagatttggttcagggacacagacaatgagtggcatcatgagactattcagactttcgtggaggaccgcctggacgatccagagatcgatgcggttggcacgctcgtgcaggaggtcgacgataacacagaccgggagatctctgtgccttcaattgacgataatggcaacgagcgcctgcagtcagttactgctgtgtccaagcacagggccccaaatcatctcgtgcagatcgagaccattagcggcagggagatcacaattactcctgaccacgagatgcatatcttcgagcagggcaacctggtgtcgaagcaggcttctaagatcacgtcaggggagtacgccgtcatcccgaagcgcctccagacgatttccccatccagccacacacctcagcatgatctcctgagggagttcctcacgcgggatgagctgacagccgacaggctcatcattcacacgtctgacccagtccggctctgcaaccgcgttttccctgaggaggtgacatcatgcaaggatgcggttgagatcatgcagaatactgcttgccatctggacaagaacaaggagaccctcatcggctggctgggcgaggggcgcattccggtcgctctcctgagggggttcgttgagacggacgaggcgctcctgatgagcatccccgacgatgttcagattggcctgaggggggagaaggtgcgcatcgacaggcacattggcttcacggaggagctcacatcgctcctgggctactacgctgctgctgggatcgtgcatacccagacgaatcccatttcctacgagagcgcgcagcaggagcagtcgaggatcaccttctacaacattgatacacagactcagaccgacctcctgaatgccctgaactctgtcttcgagatcgagccgattcagtacaacctggacggcgagatcctcggcgtgccaggggagctcattaggagggtcttcgatactgtcttcgacgttgggacccagccatcccacaagcggatcccccaggctctgttcgatgcctcagagtcccacatcacgagctacctgcgctgcttcttctccactcatgacagcctcaccacggataccagggacatcagcgctacaactgtgtcgcgggagttcaaggaggacatcattgctgctctcaggaggctgggcatcacagctgaggtcaccacgcagcagagcaggtcggtgccagaggtcctcccagactggtacgcgatcgacgatattacgcaccatgacgctgataattccctcaacctgacacggtcctacgtgatctctattgcgtcgtctgatgctgttaccctgcagagggacaggcaggctcaggagcagatcaagtacgacgcgcagggcctcatcgccaacaataacgcgattcaccagagcaggcaagtgactgatggcgggaggaaggactacatcactgagccgatcaccgacattgagtatgtggacgcggatatcgactacacctactgcctcactgtttcggagactcactcactcatcgttaatgatctctctcagaagcagtccattgtggggacagccacgttcgatcagtactggagcgtgcgcacctctaagcggacttcaggaacagtgaccgtgaccgatcacttccgcgcctgggcgaaccggggcctgaacctcggcacaatagaccaaattacattgtgcgtggagggttaccaaagctctggatcagccaacatcacccagaacaccttctctcagggctcttcttccggcagttcgggtggctcatccggctccacaacgactactcgcatcgagtgtgagaacatgtccttgtccggaccctacgttagcaggatcaccaatccctttaatggtattgcgctgtacgccaacggagacacagcccgcgctaccgttaacttccccgcaagtcgcaactacaatttccgcctgcggggttgcggcaacaacaataatcttgcccgtgtggacctgaggatcgacggacggaccgtcgggaccttttattaccagggcacatacccctgggaggccccaattgacaatgtttatgtcagtgcggggagtcatacagtcgaaatcactgttactgcggataacggcacatgggacgtgtatgccgactacctggtgatacagtgactcgagggggggcccggtacccaattcgccctatagtgagtcgtattacaattcactggccgtcgttttacaacgtcgtgactgggaaaaccctggcgttacccaacttaatcgccttgcagcacatccccctttcgccagctggcgtaatagcgaagaggcccgcaccgatcgcccttcccaacagttgcgcagcctgaatggcgaatggaaattgtaagcgttaatattttgttaaaattcgcgttaaatttttgttaaatcagctcattttttaaccaataggccgaaatcggcaaaatcccttataaatcaaaagaatagaccgagatagggttgagtgttgttccagtttggaacaagagtccactattaaagaacgtggactccaacgtcaaagggcgaaaaaccgtctatcagggcgatggcccactacgtgaaccatcaccctaatcaagttttttggggtcgaggtgccgtaaagcactaaatcggaaccctaaagggagcccccgatttagagcttgacggggaaagccggcgaacgtggcgagaaaggaagggaagaaagcgaaaggagcgggcgctagggcgctggcaagtgtagcggtcacgctgcgcgtaaccaccacacccgccgcgcttaatgcgccgctacagggcgcgtcaggtg

SEQ ID NO: 3035 - DNA, 5462 bp, Artificial Sequence
  Synthetic Construct, AS-35 intein modified protein encoding nucleic acids in pBluescript
gcacttttcggggaaatgtgcgcggaacccctatttgtttatttttctaaatacattcaaatatgtatccgctcatgagacaataaccctgataaatgcttcaataatattgaaaaaggaagagtatgagtattcaacatttccgtgtcgcccttattcccttttttgcggcattttgccttcctgtttttgctcacccagaaacgctggtgaaagtaaaagatgctgaagatcagttgggtgcacgagtgggttacatcgaactggatctcaacagcggtaagatccttgagagttttcgccccgaagaacgttttccaatgatgagcacttttaaagttctgctatgtggcgcggtattatcccgtattgacgccgggcaagagcaactcggtcgccgcatacactattctcagaatgacttggttgagtactcaccagtcacagaaaagcatcttacggatggcatgacagtaagagaattatgcagtgctgccataaccatgagtgataacactgcggccaacttacttctgacaacgatcggaggaccgaaggagctaaccgcttttttgcacaacatgggggatcatgtaactcgccttgatcgttgggaaccggagctgaatgaagccataccaaacgacgagcgtgacaccacgatgcctgtagcaatggcaacaacgttgcgcaaactattaactggcgaactacttactctagcttcccggcaacaattaatagactggatggaggcggataaagttgcaggaccacttctgcgctcggcccttccggctggctggtttattgctgataaatctggagccggtgagcgtgggtctcgcggtatcattgcagcactggggccagatggtaagccctcccgtatcgtagttatctacacgacggggagtcaggcaactatggatgaacgaaatagacagatcgctgagataggtgcctcactgattaagcattggtaactgtcagaccaagtttactcatatatactttagattgatttaaaacttcatttttaatttaaaaggatctaggtgaagatcctttttgataatctcatgaccaaaatcccttaacgtgagttttcgttccactgagcgtcagaccccgtagaaaagatcaaaggatcttcttgagatcctttttttctgcgcgtaatctgctgcttgcaaacaaaaaaaccaccgctaccagcggtggtttgtttgccggatcaagagctaccaactctttttccgaaggtaactggcttcagcagagcgcagataccaaatactgtccttctagtgtagccgtagttaggccaccacttcaagaactctgtagcaccgcctacatacctcgctctgctaatcctgttaccagtggctgctgccagtggcgataagtcgtgtcttaccgggttggactcaagacgatagttaccggataaggcgcagcggtcgggctgaacggggggttcgtgcacacagcccagcttggagcgaacgacctacaccgaactgagatacctacagcgtgagctatgagaaagcgccacgcttcccgaagggagaaaggcggacaggtatccggtaagcggcagggtcggaacaggagagcgcacgagggagcttccagggggaaacgcctggtatctttatagtcctgtcgggtttcgccacctctgacttgagcgtcgatttttgtgatgctcgtcaggggggcggagcctatggaaaaacgccagcaacgcggcctttttacggttcctggccttttgctggccttttgctcacatgttctttcctgcgttatcccctgattctgtggataaccgtattaccgcctttgagtgagctgataccgctcgccgcagccgaacgaccgagcgcagcgagtcagtgagcgaggaagcggaagagcgcccaatacgcaaaccgcctctccccgcgcgttggccgattcattaatgcagctggcacgacaggtttcccgactggaaagcgggcagtgagcgcaacgcaattaatgtgagttagctcactcattaggcaccccaggctttacactttatgcttccggctcgtatgttgtgtggaattgtgagcggataacaatttcacacaggaaacagcatatgcaaacaagcattactctgacatccaacgcatccggtacgtttgacggttactattacgaactctggaaggatactggcaatacaacaatgacggtctacactcaaggtcgcttttcctgccagtggtcgaacatcaataacgcgttgtttaggaccgggaagaaatacaaccagaattggcagtctcttggcacaatccggatcacgtactctgcgacttacaacccaaacgggaactcctacttgtgtatctatggctggtctaccaacccattggtcgagttctacatcgttgagtcctgggggaactggagaccgcctggtgccacgtccctgggccaagtgacaatcgatggcgggacctacgacatctataggacgacacgcgtcaaccagccttcggtcgctgcggactcgcggctggtcgctgtttcgccggatgacaagatcgttttcactactattgaggatttctggaagaagctgaacacgccaatcgagcgcaatgggaagttccggaagcgcacatgcgtctctgagggctggcagacttacgctttcgacgagaaccacgaggcctcactgaggcctatcgagaaggcgattcggtacaccgctgatgagtctgagcagctcaggaggatcaccacgcagctcggcaggtcgctggacattacggatgagcactctctgttccgctacgacgatggcatcgaggaggtggctggggacgatctgaccgctggcgacatcattgtcgcgccgaggaccctcgatgttgaggtgacgcagacaactctcgacctgtccgagtacatccacgataacgagaggtgcccaagcgagcagaccggctcgggggagctcaatctggcctccaagagcgcgatctcggactctaggaacaaggagaccccgggcgtgacgcataatatcctcccccagcggagcaagttcaccgacgagatgaccacgctctcaccaacggctgttggcgggctggagtccgagcagaacgagaccctcagggtcggcgagagcacgggggccatcgagaggtacattaatgtggacgattcgttcggctggctcctggggcagttcatcgcgcagaggtcaatttccacagacgctctgaccatgacggtccacactgccgcggagaagcatgccgagcggatcgttgcgaccagcgactcggtgttcgggattaagccaacggtgaactccatcgagcgcggctacgagattgtgttcccttccgtcttcgacacaatcgtcagcggcctcactgcgaaggagcagagcgagcccgagcaggacgtggatcacacacatactgacgagatcggcattccggagtgcatcctgcacgcccccgacgatattgtcctctccttcctgcaggggttcatcctcgcggagaacgctcagcggaagggcaatgctgcctccgaggccagcgagatggtctctgagtcagagacaactgttaccctggagacgccatcggtcggcgttaaggacgggctcgtgttcctgtgccacaggctcggggtcatcacggatatttcggagaagtctggcgaggagtacagcgttcatttcgaggagtctcgctacacagtgtcaatcgccacagagggcaagactaaccccctcgaccagatcctgaatggggagaggccaacaatgcctgagggcgtgagcgtcccagttccagatgctctcctgactatccacgagtcaattgccaactccccacatatcgaccaggtcattcctgataccgtggtccagcaggagacagtttccctggagactctgcagagcctcctgaccggcctgtcgacggtggacctcccagctcagctggaggctaagcgcgacgagctcacactcctgactgagggcgatctctcttacctgagggtggagtcagtcgagtgcgttgactacgatggctacctgtacgatctccaggttgggggggagccagttttcacagctaattggctctacgctcataattccattgtggggacagccacgttcgatcagtactggagcgtgcgcacctctaagcggacttcaggaacagtgaccgtgaccgatcacttccgcgcctgggcgaaccggggcctgaacctcggcacaatagaccaaattacattgtgcgtggagggttaccaaagctctggatcagccaacatcacccagaacaccttctctcagggctcttcttccggcagttcgggtggctcatccggctccacaacgactactcgcatcgagtgtgagaacatgtccttgtccggaccctacgttagcaggatcaccaatccctttaatggtattgcgctgtacgccaacggagacacagcccgcgctaccgttaacttccccgcaagtcgcaactacaatttccgcctgcggggttgcggcaacaacaataatcttgcccgtgtggacctgaggatcgacggacggaccgtcgggaccttttattaccagggcacatacccctgggaggccccaattgacaatgtttatgtcagtgcggggagtcatacagtcgaaatcactgttactgcggataacggcacatgggacgtgtatgccgactacctggtgatacagtgactcgagggggggcccggtacccaattcgccctatagtgagtcgtattacaattcactggccgtcgttttacaacgtcgtgactgggaaaaccctggcgttacccaacttaatcgccttgcagcacatccccctttcgccagctggcgtaatagcgaagaggcccgcaccgatcgcccttcccaacagttgcgcagcctgaatggcgaatggaaattgtaagcgttaatattttgttaaaattcgcgttaaatttttgttaaatcagctcattttttaaccaataggccgaaatcggcaaaatcccttataaatcaaaagaatagaccgagatagggttgagtgttgttccagtttggaacaagagtccactattaaagaacgtggactccaacgtcaaagggcgaaaaaccgtctatcagggcgatggcccactacgtgaaccatcaccctaatcaagttttttggggtcgaggtgccgtaaagcactaaatcggaaccctaaagggagcccccgatttagagcttgacggggaaagccggcgaacgtggcgagaaaggaagggaagaaagcgaaaggagcgggcgctagggcgctggcaagtgtagcggtcacgctgcgcgtaaccaccacacccgccgcgcttaatgcgccgctacagggcgcgtcaggtg

SEQ ID NO: 3036 - DNA, 5054 bp, Artificial Sequence
  Synthetic Construct, AS-36 intein modified protein encoding nucleic acids in pBluescript
gcacttttcggggaaatgtgcgcggaacccctatttgtttatttttctaaatacattcaaatatgtatccgctcatgagacaataaccctgataaatgcttcaataatattgaaaaaggaagagtatgagtattcaacatttccgtgtcgcccttattcccttttttgcggcattttgccttcctgtttttgctcacccagaaacgctggtgaaagtaaaagatgctgaagatcagttgggtgcacgagtgggttacatcgaactggatctcaacagcggtaagatccttgagagttttcgccccgaagaacgttttccaatgatgagcacttttaaagttctgctatgtggcgcggtattatcccgtattgacgccgggcaagagcaactcggtcgccgcatacactattctcagaatgacttggttgagtactcaccagtcacagaaaagcatcttacggatggcatgacagtaagagaattatgcagtgctgccataaccatgagtgataacactgcggccaacttacttctgacaacgatcggaggaccgaaggagctaaccgcttttttgcacaacatgggggatcatgtaactcgccttgatcgttgggaaccggagctgaatgaagccataccaaacgacgagcgtgacaccacgatgcctgtagcaatggcaacaacgttgcgcaaactattaactggcgaactacttactctagcttcccggcaacaattaatagactggatggaggcggataaagttgcaggaccacttctgcgctcggcccttccggctggctggtttattgctgataaatctggagccggtgagcgtgggtctcgcggtatcattgcagcactggggccagatggtaagccctcccgtatcgtagttatctacacgacggggagtcaggcaactatggatgaacgaaatagacagatcgctgagataggtgcctcactgattaagcattggtaactgtcagaccaagtttactcatatatactttagattgatttaaaacttcatttttaatttaaaaggatctaggtgaagatcctttttgataatctcatgaccaaaatcccttaacgtgagttttcgttccactgagcgtcagaccccgtagaaaagatcaaaggatcttcttgagatcctttttttctgcgcgtaatctgctgcttgcaaacaaaaaaaccaccgctaccagcggtggtttgtttgccggatcaagagctaccaactctttttccgaaggtaactggcttcagcagagcgcagataccaaatactgtccttctagtgtagccgtagttaggccaccacttcaagaactctgtagcaccgcctacatacctcgctctgctaatcctgttaccagtggctgctgccagtggcgataagtcgtgtcttaccgggttggactcaagacgatagttaccggataaggcgcagcggtcgggctgaacggggggttcgtgcacacagcccagcttggagcgaacgacctacaccgaactgagatacctacagcgtgagctatgagaaagcgccacgcttcccgaagggagaaaggcggacaggtatccggtaagcggcagggtcggaacaggagagcgcacgagggagcttccagggggaaacgcctggtatctttatagtcctgtcgggtttcgccacctctgacttgagcgtcgatttttgtgatgctcgtcaggggggcggagcctatggaaaaacgccagcaacgcggcctttttacggttcctggccttttgctggccttttgctcacatgttctttcctgcgttatcccctgattctgtggataaccgtattaccgcctttgagtgagctgataccgctcgccgcagccgaacgaccgagcgcagcgagtcagtgagcgaggaagcggaagagcgcccaatacgcaaaccgcctctccccgcgcgttggccgattcattaatgcagctggcacgacaggtttcccgactggaaagcgggcagtgagcgcaacgcaattaatgtgagttagctcactcattaggcaccccaggctttacactttatgcttccggctcgtatgttgtgtggaattgtgagcggataacaatttcacacaggaaacagcatatgcaaacaagcattactctgacatccaacgcatccggtacgtttgacggttactattacgaactctggaaggatactggcaatacaacaatgacggtctacactcaaggtcgcttttcctgccagtggtcgaacatcaataacgcgttgtttaggaccgggaagaaatacaaccagaattggcagtctcttggcacaatccggatcacgtactctgcgacttacaacccaaacgggaactcctacttgtgtatctatggctggtctaccaacccattggtcgagttctacatcgttgagtcctgggggaactggagaccgcctggtgccacgtccctgggccaagtgacaatcgatggcgggacctacgacatctataggacgacacgcgtcaaccagccttgcctcactgcggactcaacagtcatgctcaaggagaaggggatggtctcggtctcggaggtggagacaggggatcagatcgctcagcgctccgacacaggcttccagtacaagccggtggaggagactcacgcgtacgagaacgctgagacactcactgtcaccctgacgaacggctgctctatccgcgggaccccgaatcacaggctcatggtcgacgatgagtggacgcgcatcgacgagattcagcccgatcaggaggttcattacacactcggctggctgagggagactaaccagtccccgcccaagctccactctcagtcacataccacggtgaatcagacagctgactccatcagcccggattccagcgagcccattgagctgtcggagtctgagaacgcggacacgggcaacaggcacaattctgctgttgccgtgaagcagtcacggacacagactcagctgatcagcgacgaggtggtctcgcggccagagcacaccaggaggcctgatcagctctccgaggagctggctgagctcctgggcctctggatcgacacggggctgtggcatcagagcggcgtccagttcaacgttgagcgcgagaatatcgcggagtacattgaccagctctcacagcagctgttcgataccccagctgctatctccgacacggatggcacctacacggtggacattacagatcataagctcaaggagtggtggaaggctaacttcggcgggaagccagacggcactcagtcgtcttacgtcccacagatgatcaaggaggcccctacaaatgttattgaggcgttcctgagggggtgcttcactgctgagggcgggctcaggaaggacatgaggccacggctgtgcacctcatccgaggatagcatcgacgatattgcggtcctcatgatgggcctggggtaccctgtggagaagtcggtcatcaggaacgctgacggcgagccgtactactcggttatgcccgctaccgacgatgggctctctgccttcctgcacgacgtgggcttcatcgatgagcggcgcgagatcgggctctccaacattgagagctcggatagccgggccctgaacaatacccataagatcgaggttgagtcaattgtggagtccccacctgcgacggtctacgacattacagtggcggataatcatgagtacgttacagatggcatcatttcacacaactccattgtggggacagccacgttcgatcagtactggagcgtgcgcacctctaagcggacttcaggaacagtgaccgtgaccgatcacttccgcgcctgggcgaaccggggcctgaacctcggcacaatagaccaaattacattgtgcgtggagggttaccaaagctctggatcagccaacatcacccagaacaccttctctcagggctcttcttccggcagttcgggtggctcatccggctccacaacgactactcgcatcgagtgtgagaacatgtccttgtccggaccctacgttagcaggatcaccaatccctttaatggtattgcgctgtacgccaacggagacacagcccgcgctaccgttaacttccccgcaagtcgcaactacaatttccgcctgcggggttgcggcaacaacaataatcttgcccgtgtggacctgaggatcgacggacggaccgtcgggaccttttattaccagggcacatacccctgggaggccccaattgacaatgtttatgtcagtgcggggagtcatacagtcgaaatcactgttactgcggataacggcacatgggacgtgtatgccgactacctggtgatacagtgactcgagggggggcccggtacccaattcgccctatagtgagtcgtattacaattcactggccgtcgttttacaacgtcgtgactgggaaaaccctggcgttacccaacttaatcgccttgcagcacatccccctttcgccagctggcgtaatagcgaagaggcccgcaccgatcgcccttcccaacagttgcgcagcctgaatggcgaatggaaattgtaagcgttaatattttgttaaaattcgcgttaaatttttgttaaatcagctcattttttaaccaataggccgaaatcggcaaaatcccttataaatcaaaagaatagaccgagatagggttgagtgttgttccagtttggaacaagagtccactattaaagaacgtggactccaacgtcaaagggcgaaaaaccgtctatcagggcgatggcccactacgtgaaccatcaccctaatcaagttttttggggtcgaggtgccgtaaagcactaaatcggaaccctaaagggagcccccgatttagagcttgacggggaaagccggcgaacgtggcgagaaaggaagggaagaaagcgaaaggagcgggcgctagggcgctggcaagtgtagcggtcacgctgcgcgtaaccaccacacccgccgcgcttaatgcgccgctacagggcgcgtcaggtg

SEQ ID NO: 3037 - DNA, 5144 bp, Artificial Sequence
  Synthetic Construct, AS-37 intein modified protein encoding nucleic acids in pBluescript
gcacttttcggggaaatgtgcgcggaacccctatttgtttatttttctaaatacattcaaatatgtatccgctcatgagacaataaccctgataaatgcttcaataatattgaaaaaggaagagtatgagtattcaacatttccgtgtcgcccttattcccttttttgcggcattttgccttcctgtttttgctcacccagaaacgctggtgaaagtaaaagatgctgaagatcagttgggtgcacgagtgggttacatcgaactggatctcaacagcggtaagatccttgagagttttcgccccgaagaacgttttccaatgatgagcacttttaaagttctgctatgtggcgcggtattatcccgtattgacgccgggcaagagcaactcggtcgccgcatacactattctcagaatgacttggttgagtactcaccagtcacagaaaagcatcttacggatggcatgacagtaagagaattatgcagtgctgccataaccatgagtgataacactgcggccaacttacttctgacaacgatcggaggaccgaaggagctaaccgcttttttgcacaacatgggggatcatgtaactcgccttgatcgttgggaaccggagctgaatgaagccataccaaacgacgagcgtgacaccacgatgcctgtagcaatggcaacaacgttgcgcaaactattaactggcgaactacttactctagcttcccggcaacaattaatagactggatggaggcggataaagttgcaggaccacttctgcgctcggcccttccggctggctggtttattgctgataaatctggagccggtgagcgtgggtctcgcggtatcattgcagcactggggccagatggtaagccctcccgtatcgtagttatctacacgacggggagtcaggcaactatggatgaacgaaatagacagatcgctgagataggtgcctcactgattaagcattggtaactgtcagaccaagtttactcatatatactttagattgatttaaaacttcatttttaatttaaaaggatctaggtgaagatcctttttgataatctcatgaccaaaatcccttaacgtgagttttcgttccactgagcgtcagaccccgtagaaaagatcaaaggatcttcttgagatcctttttttctgcgcgtaatctgctgcttgcaaacaaaaaaaccaccgctaccagcggtggtttgtttgccggatcaagagctaccaactctttttccgaaggtaactggcttcagcagagcgcagataccaaatactgtccttctagtgtagccgtagttaggccaccacttcaagaactctgtagcaccgcctacatacctcgctctgctaatcctgttaccagtggctgctgccagtggcgataagtcgtgtcttaccgggttggactcaagacgatagttaccggataaggcgcagcggtcgggctgaacggggggttcgtgcacacagcccagcttggagcgaacgacctacaccgaactgagatacctacagcgtgagctatgagaaagcgccacgcttcccgaagggagaaaggcggacaggtatccggtaagcggcagggtcggaacaggagagcgcacgagggagcttccagggggaaacgcctggtatctttatagtcctgtcgggtttcgccacctctgacttgagcgtcgatttttgtgatgctcgtcaggggggcggagcctatggaaaaacgccagcaacgcggcctttttacggttcctggccttttgctggccttttgctcacatgttctttcctgcgttatcccctgattctgtggataaccgtattaccgcctttgagtgagctgataccgctcgccgcagccgaacgaccgagcgcagcgagtcagtgagcgaggaagcggaagagcgcccaatacgcaaaccgcctctccccgcgcgttggccgattcattaatgcagctggcacgacaggtttcccgactggaaagcgggcagtgagcgcaacgcaattaatgtgagttagctcactcattaggcaccccaggctttacactttatgcttccggctcgtatgttgtgtggaattgtgagcggataacaatttcacacaggaaacagcatatgcaaacaagcattactctgacatccaacgcatccggtacgtttgacggttactattacgaactctggaaggatactggcaatacaacaatgacggtctacactcaaggtcgcttttcctgccagtggtcgaacatcaataacgcgttgtttaggaccgggaagaaatacaaccagaattggcagtctcttggcacaatccggatcacgtactctgcgacttacaacccaaacgggaactcctacttgtgtatctatggctggtctaccaacccattggtcgagttctacatcgttgagtcctgggggaactggagaccgcctggtgccacgtccctgggccaagtgacaatcgatggcgggacctacgacatctataggacgacacgcgtcaaccagccttgcgtggaggagaatagcctggtttctaccgatgaggggctgcggcctatcaaggatctggacaatactactgcggagttcgagcagtgggacgagatcgatgtcggcgttaccacggacggcgggaccaagacggctacagctgtttacgataacggcttcgccaatgtgcgccagatccagaccgagagcgggttcaacattgctgctaccccaaatcaccggttccgcacgctgtccagcgacggcacttacacctggaaggaggctggcaagttcgagtccggggaccgcgtgatcctgcagaggaacaccttcgatgctggctcccgcgtgtccctggaggctaatgagagggctgacgatgcccaggacacaactgagggcccagagctgccagggaggatgacgtccgagctggccgagttcctcggctacttcatgggcagcgggtacatctcggacgagacccatgcttccgtggatctggtggtcgacagcgatgccacggagctcaactcatacctgtccaatctcggcgagcagctcttcaggattaccccggccgtcgagtctcaggagatgtcacaggttctgtccttccgggactgccacctcagccgctacttcgaggataacggctggaagaagacggacacaggccataatggggatgcttcggctgctttcgtcccagagcagatcctggagggcgacgagcaggttgtgaacggcttcctcaggggggtgttcgaggcgattgggacggtctcggagaagatcgagattctgaccacgtctacaactctggctgaccagctccagagcctcctgctctcgctgggccacgtgttcacccgggatagcacgaagctcgtcgagacaaacaattaccatgacgatcagctgaggcagaggctctgcggcgctactaggagggaggacgagcggttcatgaacgagatcgggtcactcattgagccagatgagctgaacctctccacacgcgcggacaagaatgatacttacccttcgtctgttatcgaccacgtgcagacactggacggctacgattcagtgtccgagagcctcaagtctcgcattaaccagtcacaggtcgacgggacggttagcaggaagctgatcaaggatattgaggcggagactgctgagaccgtctcgatcgccgaccatgagctcacaggcttctacgcggctactgtggagtctgtcacggaggacacagcgtacactaaggatatttcagttccaagcaacaacacatacatcgccgacgggttcgttactcataattccattgtggggacagccacgttcgatcagtactggagcgtgcgcacctctaagcggacttcaggaacagtgaccgtgaccgatcacttccgcgcctgggcgaaccggggcctgaacctcggcacaatagaccaaattacattgtgcgtggagggttaccaaagctctggatcagccaacatcacccagaacaccttctctcagggctcttcttccggcagttcgggtggctcatccggctccacaacgactactcgcatcgagtgtgagaacatgtccttgtccggaccctacgttagcaggatcaccaatccctttaatggtattgcgctgtacgccaacggagacacagcccgcgctaccgttaacttccccgcaagtcgcaactacaatttccgcctgcggggttgcggcaacaacaataatcttgcccgtgtggacctgaggatcgacggacggaccgtcgggaccttttattaccagggcacatacccctgggaggccccaattgacaatgtttatgtcagtgcggggagtcatacagtcgaaatcactgttactgcggataacggcacatgggacgtgtatgccgactacctggtgatacagtgactcgagggggggcccggtacccaattcgccctatagtgagtcgtattacaattcactggccgtcgttttacaacgtcgtgactgggaaaaccctggcgttacccaacttaatcgccttgcagcacatccccctttcgccagctggcgtaatagcgaagaggcccgcaccgatcgcccttcccaacagttgcgcagcctgaatggcgaatggaaattgtaagcgttaatattttgttaaaattcgcgttaaatttttgttaaatcagctcattttttaaccaataggccgaaatcggcaaaatcccttataaatcaaaagaatagaccgagatagggttgagtgttgttccagtttggaacaagagtccactattaaagaacgtggactccaacgtcaaagggcgaaaaaccgtctatcagggcgatggcccactacgtgaaccatcaccctaatcaagttttttggggtcgaggtgccgtaaagcactaaatcggaaccctaaagggagcccccgatttagagcttgacggggaaagccggcgaacgtggcgagaaaggaagggaagaaagcgaaaggagcgggcgctagggcgctggcaagtgtagcggtcacgctgcgcgtaaccaccacacccgccgcgcttaatgcgccgctacagggcgcgtcaggtg

SEQ ID NO: 3038 - DNA, 4472 bp, Artificial Sequence
  Synthetic Construct, AS-38 intein modified protein encoding nucleic acids in pBluescript
gcacttttcggggaaatgtgcgcggaacccctatttgtttatttttctaaatacattcaaatatgtatccgctcatgagacaataaccctgataaatgcttcaataatattgaaaaaggaagagtatgagtattcaacatttccgtgtcgcccttattcccttttttgcggcattttgccttcctgtttttgctcacccagaaacgctggtgaaagtaaaagatgctgaagatcagttgggtgcacgagtgggttacatcgaactggatctcaacagcggtaagatccttgagagttttcgccccgaagaacgttttccaatgatgagcacttttaaagttctgctatgtggcgcggtattatcccgtattgacgccgggcaagagcaactcggtcgccgcatacactattctcagaatgacttggttgagtactcaccagtcacagaaaagcatcttacggatggcatgacagtaagagaattatgcagtgctgccataaccatgagtgataacactgcggccaacttacttctgacaacgatcggaggaccgaaggagctaaccgcttttttgcacaacatgggggatcatgtaactcgccttgatcgttgggaaccggagctgaatgaagccataccaaacgacgagcgtgacaccacgatgcctgtagcaatggcaacaacgttgcgcaaactattaactggcgaactacttactctagcttcccggcaacaattaatagactggatggaggcggataaagttgcaggaccacttctgcgctcggcccttccggctggctggtttattgctgataaatctggagccggtgagcgtgggtctcgcggtatcattgcagcactggggccagatggtaagccctcccgtatcgtagttatctacacgacggggagtcaggcaactatggatgaacgaaatagacagatcgctgagataggtgcctcactgattaagcattggtaactgtcagaccaagtttactcatatatactttagattgatttaaaacttcatttttaatttaaaaggatctaggtgaagatcctttttgataatctcatgaccaaaatcccttaacgtgagttttcgttccactgagcgtcagaccccgtagaaaagatcaaaggatcttcttgagatcctttttttctgcgcgtaatctgctgcttgcaaacaaaaaaaccaccgctaccagcggtggtttgtttgccggatcaagagctaccaactctttttccgaaggtaactggcttcagcagagcgcagataccaaatactgtccttctagtgtagccgtagttaggccaccacttcaagaactctgtagcaccgcctacatacctcgctctgctaatcctgttaccagtggctgctgccagtggcgataagtcgtgtcttaccgggttggactcaagacgatagttaccggataaggcgcagcggtcgggctgaacggggggttcgtgcacacagcccagcttggagcgaacgacctacaccgaactgagatacctacagcgtgagctatgagaaagcgccacgcttcccgaagggagaaaggcggacaggtatccggtaagcggcagggtcggaacaggagagcgcacgagggagcttccagggggaaacgcctggtatctttatagtcctgtcgggtttcgccacctctgacttgagcgtcgatttttgtgatgctcgtcaggggggcggagcctatggaaaaacgccagcaacgcggcctttttacggttcctggccttttgctggccttttgctcacatgttctttcctgcgttatcccctgattctgtggataaccgtattaccgcctttgagtgagctgataccgctcgccgcagccgaacgaccgagcgcagcgagtcagtgagcgaggaagcggaagagcgcccaatacgcaaaccgcctctccccgcgcgttggccgattcattaatgcagctggcacgacaggtttcccgactggaaagcgggcagtgagcgcaacgcaattaatgtgagttagctcactcattaggcaccccaggctttacactttatgcttccggctcgtatgttgtgtggaattgtgagcggataacaatttcacacaggaaacagcatatgcaaacaagcattactctgacatccaacgcatccggtacgtttgacggttactattacgaactctggaaggatactggcaatacaacaatgacggtctacactcaaggtcgcttttcctgccagtggtcgaacatcaataacgcgttgtttaggaccgggaagaaatacaaccagaattggcagtctcttggcacaatccggatcacgtactctgcgacttacaacccaaacgggaactcctacttgtgtatctatggctggtctaccaacccattggtcgagttctacatcgttgagtcctgggggaactggagaccgcctggtgccacgtccctgggccaagtgacaatcgatggcgggacctacgacatctataggacgacacgcgtcaaccagccttctattgaggctgatgagtcaatcgttattaggcgggacggggagactgagctgacggagatcgggtcgttcgtggacactattctggccgcggacaaccaggagacccggatcacggatggccacgagattgcgctcgctccgaatgggctggaggttccctccctcgacaccgatgagcagatcaggtggaagcacattgaggcggtgagccggcatgcttcgccagacgagatcctcctgattgagctggagtcaggcaggtccatcagggctaccaaggctcactccttcgtcacgaggagggacggcgatgttctcccagtggctggcgagacactggtggtcggggacgtcctccctactgttggcagctacgatcatgcgtcggggtctatctcagtgccgctgcagtcccagagcgtcgctgctgacggcgggaccgttgagcccaacacaaatatcactgccaacgcggagcgcgattcggcctctattacctctgcgggcatcattgggtcggctacgtgggagaggatctccagcattgagacagtggcgccggagtacgagtatgtgtacgatctctctgtttccgggctggagactttcactacgggggagggggtcgttactcataattccattgtggggacagccacgttcgatcagtactggagcgtgcgcacctctaagcggacttcaggaacagtgaccgtgaccgatcacttccgcgcctgggcgaaccggggcctgaacctcggcacaatagaccaaattacattgtgcgtggagggttaccaaagctctggatcagccaacatcacccagaacaccttctctcagggctcttcttccggcagttcgggtggctcatccggctccacaacgactactcgcatcgagtgtgagaacatgtccttgtccggaccctacgttagcaggatcaccaatccctttaatggtattgcgctgtacgccaacggagacacagcccgcgctaccgttaacttccccgcaagtcgcaactacaatttccgcctgcggggttgcggcaacaacaataatcttgcccgtgtggacctgaggatcgacggacggaccgtcgggaccttttattaccagggcacatacccctgggaggccccaattgacaatgtttatgtcagtgcggggagtcatacagtcgaaatcactgttactgcggataacggcacatgggacgtgtatgccgactacctggtgatacagtgactcgagggggggcccggtacccaattcgccctatagtgagtcgtattacaattcactggccgtcgttttacaacgtcgtgactgggaaaaccctggcgttacccaacttaatcgccttgcagcacatccccctttcgccagctggcgtaatagcgaagaggcccgcaccgatcgcccttcccaacagttgcgcagcctgaatggcgaatggaaattgtaagcgttaatattttgttaaaattcgcgttaaatttttgttaaatcagctcattttttaaccaataggccgaaatcggcaaaatcccttataaatcaaaagaatagaccgagatagggttgagtgttgttccagtttggaacaagagtccactattaaagaacgtggactccaacgtcaaagggcgaaaaaccgtctatcagggcgatggcccactacgtgaaccatcaccctaatcaagttttttggggtcgaggtgccgtaaagcactaaatcggaaccctaaagggagcccccgatttagagcttgacggggaaagccggcgaacgtggcgagaaaggaagggaagaaagcgaaaggagcgggcgctagggcgctggcaagtgtagcggtcacgctgcgcgtaaccaccacacccgccgcgcttaatgcgccgctacagggcgcgtcaggtg

SEQ ID NO: 3039 - DNA, 5114 bp, Artificial Sequence
  Synthetic Construct, AS-39 intein modified protein encoding nucleic acids in pBluescript
gcacttttcggggaaatgtgcgcggaacccctatttgtttatttttctaaatacattcaaatatgtatccgctcatgagacaataaccctgataaatgcttcaataatattgaaaaaggaagagtatgagtattcaacatttccgtgtcgcccttattcccttttttgcggcattttgccttcctgtttttgctcacccagaaacgctggtgaaagtaaaagatgctgaagatcagttgggtgcacgagtgggttacatcgaactggatctcaacagcggtaagatccttgagagttttcgccccgaagaacgttttccaatgatgagcacttttaaagttctgctatgtggcgcggtattatcccgtattgacgccgggcaagagcaactcggtcgccgcatacactattctcagaatgacttggttgagtactcaccagtcacagaaaagcatcttacggatggcatgacagtaagagaattatgcagtgctgccataaccatgagtgataacactgcggccaacttacttctgacaacgatcggaggaccgaaggagctaaccgcttttttgcacaacatgggggatcatgtaactcgccttgatcgttgggaaccggagctgaatgaagccataccaaacgacgagcgtgacaccacgatgcctgtagcaatggcaacaacgttgcgcaaactattaactggcgaactacttactctagcttcccggcaacaattaatagactggatggaggcggataaagttgcaggaccacttctgcgctcggcccttccggctggctggtttattgctgataaatctggagccggtgagcgtgggtctcgcggtatcattgcagcactggggccagatggtaagccctcccgtatcgtagttatctacacgacggggagtcaggcaactatggatgaacgaaatagacagatcgctgagataggtgcctcactgattaagcattggtaactgtcagaccaagtttactcatatatactttagattgatttaaaacttcatttttaatttaaaaggatctaggtgaagatcctttttgataatctcatgaccaaaatcccttaacgtgagttttcgttccactgagcgtcagaccccgtagaaaagatcaaaggatcttcttgagatcctttttttctgcgcgtaatctgctgcttgcaaacaaaaaaaccaccgctaccagcggtggtttgtttgccggatcaagagctaccaactctttttccgaaggtaactggcttcagcagagcgcagataccaaatactgtccttctagtgtagccgtagttaggccaccacttcaagaactctgtagcaccgcctacatacctcgctctgctaatcctgttaccagtggctgctgccagtggcgataagtcgtgtcttaccgggttggactcaagacgatagttaccggataaggcgcagcggtcgggctgaacggggggttcgtgcacacagcccagcttggagcgaacgacctacaccgaactgagatacctacagcgtgagctatgagaaagcgccacgcttcccgaagggagaaaggcggacaggtatccggtaagcggcagggtcggaacaggagagcgcacgagggagcttccagggggaaacgcctggtatctttatagtcctgtcgggtttcgccacctctgacttgagcgtcgatttttgtgatgctcgtcaggggggcggagcctatggaaaaacgccagcaacgcggcctttttacggttcctggccttttgctggccttttgctcacatgttctttcctgcgttatcccctgattctgtggataaccgtattaccgcctttgagtgagctgataccgctcgccgcagccgaacgaccgagcgcagcgagtcagtgagcgaggaagcggaagagcgcccaatacgcaaaccgcctctccccgcgcgttggccgattcattaatgcagctggcacgacaggtttcccgactggaaagcgggcagtgagcgcaacgcaattaatgtgagttagctcactcattaggcaccccaggctttacactttatgcttccggctcgtatgttgtgtggaattgtgagcggataacaatttcacacaggaaacagcatatgcaaacaagcattactctgacatccaacgcatccggtacgtttgacggttactattacgaactctggaaggatactggcaatacaacaatgacggtctacactcaaggtcgcttttcctgccagtggtcgaacatcaataacgcgttgtttaggaccgggaagaaatacaaccagaattggcagtctcttggcacaatccggatcacgtactctgcgacttacaacccaaacgggaactcctacttgtgtatctatggctggtctaccaacccattggtcgagttctacatcgttgagtcctgggggaactggagaccgcctggtgccacgtccctgggccaagtgacaatcgatggcgggacctacgacatctataggacgacacgcgtcaaccagccttgcctcactgcggggacaagggttctgcgggctgatacgggggcggagactactatgggggagctgttcgcgctgcaggctagggacgttccggtgtggtcactcgacgagtccctgcgctacgtccgcaggcacctcactagggttttcccaaccggggtgaagccagtcttccggctgaggactgctagcggcaagactgtccgcgctaccgctaaccatccattcctcacctacgatgggtggaagcctctcggcgagctgtcggtggctgacaggctggcggttccgaggcacgtgccagctccagagagggtggcttcatggacggacgatcaggtcctcctgctcggccatctcatcggcgatgggtccttcgtcaagaggcagccactccgctacgctagcgttgacgaggctaacctgtcggctgtgacggaggctgctgctaatgccttctccattgtcgcggttcgggacgagtacgctgctgctaggtgcaccacgctcaggctgccagctccttacaggctgacccacggcaggaggaatccactcgctgcttggctggacgagctcggcctgttcgggctcaggagctacgagaagttcgtcccgcaggaggttttccacctgcccaagaggcagatcgctctcttcctgcggcatctctgggcgactgatggctctgtgacgctgacaaggcagtcacgcggcgggaggatctactacgcctcgacatctctccagctgattcaggacgtctccaggctgctcctgcggttcggcattagcacgagggtgcggacaactaccccaaagggggaccacaggcctggctacacactcgatgtttctggcgtggacgatcagaggcggttcctgcaggagatcggcgtccatggggccaggggcgctaccgctgacaggctcctggaggtcatcagggatgtctccgcgaacacgaatgtcgacacagttcccaggcaggtttgggacgatgtgcgcaggctcctggtggagaaggagatgacgcacagggagttcgctgctgctatggggacatcgttcggcgggtccagcctctggaagcatgctccatctcgcgagaggctcggcagggtggcccaggtcctggactcggccgagctcgatgttctggcggtgaacgacgtcctgtgggatgaggtggtcgcgatcgagcctgacggcgaggagcaggtctacgatgctactgttctcggggggcacaacttcgtggcggatggcattgctgttcataattccattgtggggacagccacgttcgatcagtactggagcgtgcgcacctctaagcggacttcaggaacagtgaccgtgaccgatcacttccgcgcctgggcgaaccggggcctgaacctcggcacaatagaccaaattacattgtgcgtggagggttaccaaagctctggatcagccaacatcacccagaacaccttctctcagggctcttcttccggcagttcgggtggctcatccggctccacaacgactactcgcatcgagtgtgagaacatgtccttgtccggaccctacgttagcaggatcaccaatccctttaatggtattgcgctgtacgccaacggagacacagcccgcgctaccgttaacttccccgcaagtcgcaactacaatttccgcctgcggggttgcggcaacaacaataatcttgcccgtgtggacctgaggatcgacggacggaccgtcgggaccttttattaccagggcacatacccctgggaggccccaattgacaatgtttatgtcagtgcggggagtcatacagtcgaaatcactgttactgcggataacggcacatgggacgtgtatgccgactacctggtgatacagtgactcgagggggggcccggtacccaattcgccctatagtgagtcgtattacaattcactggccgtcgttttacaacgtcgtgactgggaaaaccctggcgttacccaacttaatcgccttgcagcacatccccctttcgccagctggcgtaatagcgaagaggcccgcaccgatcgcccttcccaacagttgcgcagcctgaatggcgaatggaaattgtaagcgttaatattttgttaaaattcgcgttaaatttttgttaaatcagctcattttttaaccaataggccgaaatcggcaaaatcccttataaatcaaaagaatagaccgagatagggttgagtgttgttccagtttggaacaagagtccactattaaagaacgtggactccaacgtcaaagggcgaaaaaccgtctatcagggcgatggcccactacgtgaaccatcaccctaatcaagttttttggggtcgaggtgccgtaaagcactaaatcggaaccctaaagggagcccccgatttagagcttgacggggaaagccggcgaacgtggcgagaaaggaagggaagaaagcgaaaggagcgggcgctagggcgctggcaagtgtagcggtcacgctgcgcgtaaccaccacacccgccgcgcttaatgcgccgctacagggcgcgtcaggtg

SEQ ID NO: 3040 - DNA, 4970 bp, Artificial Sequence
  Synthetic Construct, AS-40 intein modified protein encoding nucleic acids in pBluescript
gcacttttcggggaaatgtgcgcggaacccctatttgtttatttttctaaatacattcaaatatgtatccgctcatgagacaataaccctgataaatgcttcaataatattgaaaaaggaagagtatgagtattcaacatttccgtgtcgcccttattcccttttttgcggcattttgccttcctgtttttgctcacccagaaacgctggtgaaagtaaaagatgctgaagatcagttgggtgcacgagtgggttacatcgaactggatctcaacagcggtaagatccttgagagttttcgccccgaagaacgttttccaatgatgagcacttttaaagttctgctatgtggcgcggtattatcccgtattgacgccgggcaagagcaactcggtcgccgcatacactattctcagaatgacttggttgagtactcaccagtcacagaaaagcatcttacggatggcatgacagtaagagaattatgcagtgctgccataaccatgagtgataacactgcggccaacttacttctgacaacgatcggaggaccgaaggagctaaccgcttttttgcacaacatgggggatcatgtaactcgccttgatcgttgggaaccggagctgaatgaagccataccaaacgacgagcgtgacaccacgatgcctgtagcaatggcaacaacgttgcgcaaactattaactggcgaactacttactctagcttcccggcaacaattaatagactggatggaggcggataaagttgcaggaccacttctgcgctcggcccttccggctggctggtttattgctgataaatctggagccggtgagcgtgggtctcgcggtatcattgcagcactggggccagatggtaagccctcccgtatcgtagttatctacacgacggggagtcaggcaactatggatgaacgaaatagacagatcgctgagataggtgcctcactgattaagcattggtaactgtcagaccaagtttactcatatatactttagattgatttaaaacttcatttttaatttaaaaggatctaggtgaagatcctttttgataatctcatgaccaaaatcccttaacgtgagttttcgttccactgagcgtcagaccccgtagaaaagatcaaaggatcttcttgagatcctttttttctgcgcgtaatctgctgcttgcaaacaaaaaaaccaccgctaccagcggtggtttgtttgccggatcaagagctaccaactctttttccgaaggtaactggcttcagcagagcgcagataccaaatactgtccttctagtgtagccgtagttaggccaccacttcaagaactctgtagcaccgcctacatacctcgctctgctaatcctgttaccagtggctgctgccagtggcgataagtcgtgtcttaccgggttggactcaagacgatagttaccggataaggcgcagcggtcgggctgaacggggggttcgtgcacacagcccagcttggagcgaacgacctacaccgaactgagatacctacagcgtgagctatgagaaagcgccacgcttcccgaagggagaaaggcggacaggtatccggtaagcggcagggtcggaacaggagagcgcacgagggagcttccagggggaaacgcctggtatctttatagtcctgtcgggtttcgccacctctgacttgagcgtcgatttttgtgatgctcgtcaggggggcggagcctatggaaaaacgccagcaacgcggcctttttacggttcctggccttttgctggccttttgctcacatgttctttcctgcgttatcccctgattctgtggataaccgtattaccgcctttgagtgagctgataccgctcgccgcagccgaacgaccgagcgcagcgagtcagtgagcgaggaagcggaagagcgcccaatacgcaaaccgcctctccccgcgcgttggccgattcattaatgcagctggcacgacaggtttcccgactggaaagcgggcagtgagcgcaacgcaattaatgtgagttagctcactcattaggcaccccaggctttacactttatgcttccggctcgtatgttgtgtggaattgtgagcggataacaatttcacacaggaaacagcatatgcaaacaagcattactctgacatccaacgcatccggtacgtttgacggttactattacgaactctggaaggatactggcaatacaacaatgacggtctacactcaaggtcgcttttcctgccagtggtcgaacatcaataacgcgttgtttaggaccgggaagaaatacaaccagaattggcagtctcttggcacaatccggatcacgtactctgcgacttacaacccaaacgggaactcctacttgtgtatctatggctggtctaccaacccattggtcgagttctacatcgttgagtcctgggggaactggagaccgcctggtgccacgtccctgggccaagtgacaatcgatggcgggacctacgacatctataggacgacacgcgtcaaccagccttgcgttacggctgacacatgggttatgacggcctcgggggctaggcaggttcgggatctcattgacaggccattcgaggcggtcgtggacggcgagtgccacccaacagagtcccgcggcttcttcttcactggggataagcctgtgctcaggctgtcgacggctgagggccacacactcaggctgactgcgaaccatccggttctcagggtgtccaagatgaccaggcagctgcgggagacggagtgggttaaggctggcgagctcaggccacacgacaagatcgtcctccacgatcatagggctctgccatcctgggacggcgctcataccgaggctgagggctacctgatcgggctcctgattggcgggggcaccctcacgagggacaaggctatcctgtctatttgggatgctgctgctccaaaggtggctaacgggggcggctcagtcccagctgctggcgtcgccggggttatgagggctgctgagctcgctgctcggaccctgccacaccgcacggacttcaatggctggcagaccacgatggagggcaggggggagtaccacatggctacaggcgccctccatactctcgctctggagctcggcctgacaccaggggataagcgcctcactgcgcctctggagacaacttccagcgctttccacaggggcctcctgagggggatgttcgacgccgatggctcggttcaggggtctcagaggaagggcgtgtccatcaggctcccacagaccgacctcgggaacctgcagacggtccagaggatgctcctgaggctgggcgttgctagcaccattcatcagaataggaggccaggcgggaccaaggtcctcccagatggcgagggcggggctaaggggcactcatgccaggccgcgcatgagctgatcatttccggcgagaatgtggtcaggtacgctgagcggatcggcttcgccgactcggataagatggacaggctcaccgctctcctgcagaggtacaggcacacgaggcatgctgagaggttcatcgcgacagtgcagagcctggaggacgatggcatggaggccgtctacgatgttacagtggcggacgttcatgctttcgatgctaatgggctctacgttcataattccattgtggggacagccacgttcgatcagtactggagcgtgcgcacctctaagcggacttcaggaacagtgaccgtgaccgatcacttccgcgcctgggcgaaccggggcctgaacctcggcacaatagaccaaattacattgtgcgtggagggttaccaaagctctggatcagccaacatcacccagaacaccttctctcagggctcttcttccggcagttcgggtggctcatccggctccacaacgactactcgcatcgagtgtgagaacatgtccttgtccggaccctacgttagcaggatcaccaatccctttaatggtattgcgctgtacgccaacggagacacagcccgcgctaccgttaacttccccgcaagtcgcaactacaatttccgcctgcggggttgcggcaacaacaataatcttgcccgtgtggacctgaggatcgacggacggaccgtcgggaccttttattaccagggcacatacccctgggaggccccaattgacaatgtttatgtcagtgcggggagtcatacagtcgaaatcactgttactgcggataacggcacatgggacgtgtatgccgactacctggtgatacagtgactcgagggggggcccggtacccaattcgccctatagtgagtcgtattacaattcactggccgtcgttttacaacgtcgtgactgggaaaaccctggcgttacccaacttaatcgccttgcagcacatccccctttcgccagctggcgtaatagcgaagaggcccgcaccgatcgcccttcccaacagttgcgcagcctgaatggcgaatggaaattgtaagcgttaatattttgttaaaattcgcgttaaatttttgttaaatcagctcattttttaaccaataggccgaaatcggcaaaatcccttataaatcaaaagaatagaccgagatagggttgagtgttgttccagtttggaacaagagtccactattaaagaacgtggactccaacgtcaaagggcgaaaaaccgtctatcagggcgatggcccactacgtgaaccatcaccctaatcaagttttttggggtcgaggtgccgtaaagcactaaatcggaaccctaaagggagcccccgatttagagcttgacggggaaagccggcgaacgtggcgagaaaggaagggaagaaagcgaaaggagcgggcgctagggcgctggcaagtgtagcggtcacgctgcgcgtaaccaccacacccgccgcgcttaatgcgccgctacagggcgcgtcaggtg

SEQ ID NO: 3041 - DNA, 4325 bp, Artificial Sequence
  Synthetic Construct, AS-41 intein modified protein encoding nucleic acids in pBluescript
gcacttttcggggaaatgtgcgcggaacccctatttgtttatttttctaaatacattcaaatatgtatccgctcatgagacaataaccctgataaatgcttcaataatattgaaaaaggaagagtatgagtattcaacatttccgtgtcgcccttattcccttttttgcggcattttgccttcctgtttttgctcacccagaaacgctggtgaaagtaaaagatgctgaagatcagttgggtgcacgagtgggttacatcgaactggatctcaacagcggtaagatccttgagagttttcgccccgaagaacgttttccaatgatgagcacttttaaagttctgctatgtggcgcggtattatcccgtattgacgccgggcaagagcaactcggtcgccgcatacactattctcagaatgacttggttgagtactcaccagtcacagaaaagcatcttacggatggcatgacagtaagagaattatgcagtgctgccataaccatgagtgataacactgcggccaacttacttctgacaacgatcggaggaccgaaggagctaaccgcttttttgcacaacatgggggatcatgtaactcgccttgatcgttgggaaccggagctgaatgaagccataccaaacgacgagcgtgacaccacgatgcctgtagcaatggcaacaacgttgcgcaaactattaactggcgaactacttactctagcttcccggcaacaattaatagactggatggaggcggataaagttgcaggaccacttctgcgctcggcccttccggctggctggtttattgctgataaatctggagccggtgagcgtgggtctcgcggtatcattgcagcactggggccagatggtaagccctcccgtatcgtagttatctacacgacggggagtcaggcaactatggatgaacgaaatagacagatcgctgagataggtgcctcactgattaagcattggtaactgtcagaccaagtttactcatatatactttagattgatttaaaacttcatttttaatttaaaaggatctaggtgaagatcctttttgataatctcatgaccaaaatcccttaacgtgagttttcgttccactgagcgtcagaccccgtagaaaagatcaaaggatcttcttgagatcctttttttctgcgcgtaatctgctgcttgcaaacaaaaaaaccaccgctaccagcggtggtttgtttgccggatcaagagctaccaactctttttccgaaggtaactggcttcagcagagcgcagataccaaatactgtccttctagtgtagccgtagttaggccaccacttcaagaactctgtagcaccgcctacatacctcgctctgctaatcctgttaccagtggctgctgccagtggcgataagtcgtgtcttaccgggttggactcaagacgatagttaccggataaggcgcagcggtcgggctgaacggggggttcgtgcacacagcccagcttggagcgaacgacctacaccgaactgagatacctacagcgtgagctatgagaaagcgccacgcttcccgaagggagaaaggcggacaggtatccggtaagcggcagggtcggaacaggagagcgcacgagggagcttccagggggaaacgcctggtatctttatagtcctgtcgggtttcgccacctctgacttgagcgtcgatttttgtgatgctcgtcaggggggcggagcctatggaaaaacgccagcaacgcggcctttttacggttcctggccttttgctggccttttgctcacatgttctttcctgcgttatcccctgattctgtggataaccgtattaccgcctttgagtgagctgataccgctcgccgcagccgaacgaccgagcgcagcgagtcagtgagcgaggaagcggaagagcgcccaatacgcaaaccgcctctccccgcgcgttggccgattcattaatgcagctggcacgacaggtttcccgactggaaagcgggcagtgagcgcaacgcaattaatgtgagttagctcactcattaggcaccccaggctttacactttatgcttccggctcgtatgttgtgtggaattgtgagcggataacaatttcacacaggaaacagcatatgcaaacaagcattactctgacatccaacgcatccggtacgtttgacggttactattacgaactctggaaggatactggcaatacaacaatgacggtctacactcaaggtcgcttttcctgccagtggtcgaacatcaataacgcgttgtttaggaccgggaagaaatacaaccagaattggcagtctcttggcacaatccggatcacgtactctgcgacttacaacccaaacgggaactcctacttgtgtatctatggctggtctaccaacccattggtcgagttctacatcgttgagtcctgggggaactggagaccgcctggtgccacgtccctgggccaagtgacaatcgatggcgggacctacgacatctataggacgacacgcgtcaaccagccttgcttcgcgggggacactgagattactgtttcggacgggcggcgctggatgtcgctccctattaggcagttcgttactgagaatttcgacatctcaaagccgggcctcgatcacgttgggacattctactccgacccaaggcagccattctacgtccgctcgattgattctcagggcaagacaagcctcaagcgggtgacttccgtcagcgttcacagggctccagctcatctggtccggttcgctaccaggagggggagggtcctcaccgttacgcctgaccatgcgatgctggtgtgggacacggattacctccgcaagatcaaggctctggaggtggctgtcggcgacagggttccagtggaggagggcgggctcgtggtcgctgatgaggttgtgtctagggagacggtgcaggctctggacgatcgggtctactgcctcactgtggcggagaatcatactctcgttgctaatggcatcttctgcgggcagtccattgtggggacagccacgttcgatcagtactggagcgtgcgcacctctaagcggacttcaggaacagtgaccgtgaccgatcacttccgcgcctgggcgaaccggggcctgaacctcggcacaatagaccaaattacattgtgcgtggagggttaccaaagctctggatcagccaacatcacccagaacaccttctctcagggctcttcttccggcagttcgggtggctcatccggctccacaacgactactcgcatcgagtgtgagaacatgtccttgtccggaccctacgttagcaggatcaccaatccctttaatggtattgcgctgtacgccaacggagacacagcccgcgctaccgttaacttccccgcaagtcgcaactacaatttccgcctgcggggttgcggcaacaacaataatcttgcccgtgtggacctgaggatcgacggacggaccgtcgggaccttttattaccagggcacatacccctgggaggccccaattgacaatgtttatgtcagtgcggggagtcatacagtcgaaatcactgttactgcggataacggcacatgggacgtgtatgccgactacctggtgatacagtgactcgagggggggcccggtacccaattcgccctatagtgagtcgtattacaattcactggccgtcgttttacaacgtcgtgactgggaaaaccctggcgttacccaacttaatcgccttgcagcacatccccctttcgccagctggcgtaatagcgaagaggcccgcaccgatcgcccttcccaacagttgcgcagcctgaatggcgaatggaaattgtaagcgttaatattttgttaaaattcgcgttaaatttttgttaaatcagctcattttttaaccaataggccgaaatcggcaaaatcccttataaatcaaaagaatagaccgagatagggttgagtgttgttccagtttggaacaagagtccactattaaagaacgtggactccaacgtcaaagggcgaaaaaccgtctatcagggcgatggcccactacgtgaaccatcaccctaatcaagttttttggggtcgaggtgccgtaaagcactaaatcggaaccctaaagggagcccccgatttagagcttgacggggaaagccggcgaacgtggcgagaaaggaagggaagaaagcgaaaggagcgggcgctagggcgctggcaagtgtagcggtcacgctgcgcgtaaccaccacacccgccgcgcttaatgcgccgctacagggcgcgtcaggtg

SEQ ID NO: 3042 - DNA, 4640 bp, Artificial Sequence
  Synthetic Construct, AS-42 intein modified protein encoding nucleic acids in pBluescript
gcacttttcggggaaatgtgcgcggaacccctatttgtttatttttctaaatacattcaaatatgtatccgctcatgagacaataaccctgataaatgcttcaataatattgaaaaaggaagagtatgagtattcaacatttccgtgtcgcccttattcccttttttgcggcattttgccttcctgtttttgctcacccagaaacgctggtgaaagtaaaagatgctgaagatcagttgggtgcacgagtgggttacatcgaactggatctcaacagcggtaagatccttgagagttttcgccccgaagaacgttttccaatgatgagcacttttaaagttctgctatgtggcgcggtattatcccgtattgacgccgggcaagagcaactcggtcgccgcatacactattctcagaatgacttggttgagtactcaccagtcacagaaaagcatcttacggatggcatgacagtaagagaattatgcagtgctgccataaccatgagtgataacactgcggccaacttacttctgacaacgatcggaggaccgaaggagctaaccgcttttttgcacaacatgggggatcatgtaactcgccttgatcgttgggaaccggagctgaatgaagccataccaaacgacgagcgtgacaccacgatgcctgtagcaatggcaacaacgttgcgcaaactattaactggcgaactacttactctagcttcccggcaacaattaatagactggatggaggcggataaagttgcaggaccacttctgcgctcggcccttccggctggctggtttattgctgataaatctggagccggtgagcgtgggtctcgcggtatcattgcagcactggggccagatggtaagccctcccgtatcgtagttatctacacgacggggagtcaggcaactatggatgaacgaaatagacagatcgctgagataggtgcctcactgattaagcattggtaactgtcagaccaagtttactcatatatactttagattgatttaaaacttcatttttaatttaaaaggatctaggtgaagatcctttttgataatctcatgaccaaaatcccttaacgtgagttttcgttccactgagcgtcagaccccgtagaaaagatcaaaggatcttcttgagatcctttttttctgcgcgtaatctgctgcttgcaaacaaaaaaaccaccgctaccagcggtggtttgtttgccggatcaagagctaccaactctttttccgaaggtaactggcttcagcagagcgcagataccaaatactgtccttctagtgtagccgtagttaggccaccacttcaagaactctgtagcaccgcctacatacctcgctctgctaatcctgttaccagtggctgctgccagtggcgataagtcgtgtcttaccgggttggactcaagacgatagttaccggataaggcgcagcggtcgggctgaacggggggttcgtgcacacagcccagcttggagcgaacgacctacaccgaactgagatacctacagcgtgagctatgagaaagcgccacgcttcccgaagggagaaaggcggacaggtatccggtaagcggcagggtcggaacaggagagcgcacgagggagcttccagggggaaacgcctggtatctttatagtcctgtcgggtttcgccacctctgacttgagcgtcgatttttgtgatgctcgtcaggggggcggagcctatggaaaaacgccagcaacgcggcctttttacggttcctggccttttgctggccttttgctcacatgttctttcctgcgttatcccctgattctgtggataaccgtattaccgcctttgagtgagctgataccgctcgccgcagccgaacgaccgagcgcagcgagtcagtgagcgaggaagcggaagagcgcccaatacgcaaaccgcctctccccgcgcgttggccgattcattaatgcagctggcacgacaggtttcccgactggaaagcgggcagtgagcgcaacgcaattaatgtgagttagctcactcattaggcaccccaggctttacactttatgcttccggctcgtatgttgtgtggaattgtgagcggataacaatttcacacaggaaacagcatatgcaaacaagcattactctgacatccaacgcatccggtacgtttgacggttactattacgaactctggaaggatactggcaatacaacaatgacggtctacactcaaggtcgcttttcctgccagtggtcgaacatcaataacgcgttgtttaggaccgggaagaaatacaaccagaattggcagtctcttggcacaatccggatcacgtactctgcgacttacaacccaaacgggaactcctacttgtgtatctatggctggtctaccaacccattggtcgagttctacatcgttgagtcctgggggaactggagaccgcctggtgccacgtccctgggccaagtgacaatcgatggcgggacctacgacatctataggacgacacgcgtcaaccagccttgcttcgctgcgggcactctcatcaagacaccaaaggggcctgttcctattgagcagattcagtcgggggatctcgttttcaatgcgatcggcattggggtggtcgagggcatcgtgtgccagcagaagcagaccattacgctggagctgtctgacggcacatcaatcgtctgcactcacgatcatccattcttctgccctcgcggctgggtcgctgctggcgacctggaggttggctccgggctgttcagccacgaggatctccgcaggctgtggtcgggcggggcttctctcggcctggagtccgggtccagcgacggcaggggggctgttcgctcgtctgaggtgctcctgaggatcctcagggaggaggctcgcgagccagatgctggctactgcgggccagccgaggacgtgcgcaacgcgtctaccgatagggctcatgctgagggcgcttggtggcagtggcaggctgacccgattgcgtcagatgaggctgctaggtccgctggcaggagggtcgctgaccgcgttagggacgaggataggagggaggctaggccagagccaaccgctgtcctcctgcaggacaggcactgcgagccactggctaacgatcggaataggagcggcagggagcattcatcccggggcacgggggaggctgagggccagcggcagggggacgtgccatgctcggtccgcgttgtgagcatctcgcgcgaggagaggggcgggcctgaggcggtgtacaacctcagggtttcagggcatccaagctacttcgctgggggggttctcgttcataattccattgtggggacagccacgttcgatcagtactggagcgtgcgcacctctaagcggacttcaggaacagtgaccgtgaccgatcacttccgcgcctgggcgaaccggggcctgaacctcggcacaatagaccaaattacattgtgcgtggagggttaccaaagctctggatcagccaacatcacccagaacaccttctctcagggctcttcttccggcagttcgggtggctcatccggctccacaacgactactcgcatcgagtgtgagaacatgtccttgtccggaccctacgttagcaggatcaccaatccctttaatggtattgcgctgtacgccaacggagacacagcccgcgctaccgttaacttccccgcaagtcgcaactacaatttccgcctgcggggttgcggcaacaacaataatcttgcccgtgtggacctgaggatcgacggacggaccgtcgggaccttttattaccagggcacatacccctgggaggccccaattgacaatgtttatgtcagtgcggggagtcatacagtcgaaatcactgttactgcggataacggcacatgggacgtgtatgccgactacctggtgatacagtgactcgagggggggcccggtacccaattcgccctatagtgagtcgtattacaattcactggccgtcgttttacaacgtcgtgactgggaaaaccctggcgttacccaacttaatcgccttgcagcacatccccctttcgccagctggcgtaatagcgaagaggcccgcaccgatcgcccttcccaacagttgcgcagcctgaatggcgaatggaaattgtaagcgttaatattttgttaaaattcgcgttaaatttttgttaaatcagctcattttttaaccaataggccgaaatcggcaaaatcccttataaatcaaaagaatagaccgagatagggttgagtgttgttccagtttggaacaagagtccactattaaagaacgtggactccaacgtcaaagggcgaaaaaccgtctatcagggcgatggcccactacgtgaaccatcaccctaatcaagttttttggggtcgaggtgccgtaaagcactaaatcggaaccctaaagggagcccccgatttagagcttgacggggaaagccggcgaacgtggcgagaaaggaagggaagaaagcgaaaggagcgggcgctagggcgctggcaagtgtagcggtcacgctgcgcgtaaccaccacacccgccgcgcttaatgcgccgctacagggcgcgtcaggtg

SEQ ID NO: 3043 - DNA, 4325 bp, Artificial Sequence
  Synthetic Construct, AS-43 intein modified protein encoding nucleic acids in pBluescript
gcacttttcggggaaatgtgcgcggaacccctatttgtttatttttctaaatacattcaaatatgtatccgctcatgagacaataaccctgataaatgcttcaataatattgaaaaaggaagagtatgagtattcaacatttccgtgtcgcccttattcccttttttgcggcattttgccttcctgtttttgctcacccagaaacgctggtgaaagtaaaagatgctgaagatcagttgggtgcacgagtgggttacatcgaactggatctcaacagcggtaagatccttgagagttttcgccccgaagaacgttttccaatgatgagcacttttaaagttctgctatgtggcgcggtattatcccgtattgacgccgggcaagagcaactcggtcgccgcatacactattctcagaatgacttggttgagtactcaccagtcacagaaaagcatcttacggatggcatgacagtaagagaattatgcagtgctgccataaccatgagtgataacactgcggccaacttacttctgacaacgatcggaggaccgaaggagctaaccgcttttttgcacaacatgggggatcatgtaactcgccttgatcgttgggaaccggagctgaatgaagccataccaaacgacgagcgtgacaccacgatgcctgtagcaatggcaacaacgttgcgcaaactattaactggcgaactacttactctagcttcccggcaacaattaatagactggatggaggcggataaagttgcaggaccacttctgcgctcggcccttccggctggctggtttattgctgataaatctggagccggtgagcgtgggtctcgcggtatcattgcagcactggggccagatggtaagccctcccgtatcgtagttatctacacgacggggagtcaggcaactatggatgaacgaaatagacagatcgctgagataggtgcctcactgattaagcattggtaactgtcagaccaagtttactcatatatactttagattgatttaaaacttcatttttaatttaaaaggatctaggtgaagatcctttttgataatctcatgaccaaaatcccttaacgtgagttttcgttccactgagcgtcagaccccgtagaaaagatcaaaggatcttcttgagatcctttttttctgcgcgtaatctgctgcttgcaaacaaaaaaaccaccgctaccagcggtggtttgtttgccggatcaagagctaccaactctttttccgaaggtaactggcttcagcagagcgcagataccaaatactgtccttctagtgtagccgtagttaggccaccacttcaagaactctgtagcaccgcctacatacctcgctctgctaatcctgttaccagtggctgctgccagtggcgataagtcgtgtcttaccgggttggactcaagacgatagttaccggataaggcgcagcggtcgggctgaacggggggttcgtgcacacagcccagcttggagcgaacgacctacaccgaactgagatacctacagcgtgagctatgagaaagcgccacgcttcccgaagggagaaaggcggacaggtatccggtaagcggcagggtcggaacaggagagcgcacgagggagcttccagggggaaacgcctggtatctttatagtcctgtcgggtttcgccacctctgacttgagcgtcgatttttgtgatgctcgtcaggggggcggagcctatggaaaaacgccagcaacgcggcctttttacggttcctggccttttgctggccttttgctcacatgttctttcctgcgttatcccctgattctgtggataaccgtattaccgcctttgagtgagctgataccgctcgccgcagccgaacgaccgagcgcagcgagtcagtgagcgaggaagcggaagagcgcccaatacgcaaaccgcctctccccgcgcgttggccgattcattaatgcagctggcacgacaggtttcccgactggaaagcgggcagtgagcgcaacgcaattaatgtgagttagctcactcattaggcaccccaggctttacactttatgcttccggctcgtatgttgtgtggaattgtgagcggataacaatttcacacaggaaacagcatatgcaaacaagcattactctgacatccaacgcatccggtacgtttgacggttactattacgaactctggaaggatactggcaatacaacaatgacggtctacactcaaggtcgcttttcctgccagtggtcgaacatcaataacgcgttgtttaggaccgggaagaaatacaaccagaattggcagtctcttggcacaatccggatcacgtactctgcgacttacaacccaaacgggaactcctacttgtgtatctatggctggtctaccaacccattggtcgagttctacatcgttgagtcctgggggaactggagaccgcctggtgccacgtccctgggccaagtgacaatcgatggcgggacctacgacatctataggacgacacgcgtcaaccagccttgcttccatggggacacactcattgagatctacgctgacggcattctggaggagattccgatcaggcggttcgttctggagcatctggatctctcgcaggctggcgtggacgctctggggacgttctacgctgatccggtccggccagctcacgtgcgctccgtcgacacaggcgggatcccacacctccgcaagattacttccgttagcgtgcataaggcccctgcgaacctgatccagttctcgacctctaggggcaagaatctcctggtgacgccggatcatgctatgctcgtttgggacgtgtcctacctccgcaagatcagggccctggaggtcaagattggcgacgctgtcccagtttgggagtcaggggtggtcatctccgacaggatcgtcagcattgattacgttccctgcgaggacgagcgggtgtactgcctcactgtggatagggatcataatgttgtgggcaatggcatcttcactgggcagtccattgtggggacagccacgttcgatcagtactggagcgtgcgcacctctaagcggacttcaggaacagtgaccgtgaccgatcacttccgcgcctgggcgaaccggggcctgaacctcggcacaatagaccaaattacattgtgcgtggagggttaccaaagctctggatcagccaacatcacccagaacaccttctctcagggctcttcttccggcagttcgggtggctcatccggctccacaacgactactcgcatcgagtgtgagaacatgtccttgtccggaccctacgttagcaggatcaccaatccctttaatggtattgcgctgtacgccaacggagacacagcccgcgctaccgttaacttccccgcaagtcgcaactacaatttccgcctgcggggttgcggcaacaacaataatcttgcccgtgtggacctgaggatcgacggacggaccgtcgggaccttttattaccagggcacatacccctgggaggccccaattgacaatgtttatgtcagtgcggggagtcatacagtcgaaatcactgttactgcggataacggcacatgggacgtgtatgccgactacctggtgatacagtgactcgagggggggcccggtacccaattcgccctatagtgagtcgtattacaattcactggccgtcgttttacaacgtcgtgactgggaaaaccctggcgttacccaacttaatcgccttgcagcacatccccctttcgccagctggcgtaatagcgaagaggcccgcaccgatcgcccttcccaacagttgcgcagcctgaatggcgaatggaaattgtaagcgttaatattttgttaaaattcgcgttaaatttttgttaaatcagctcattttttaaccaataggccgaaatcggcaaaatcccttataaatcaaaagaatagaccgagatagggttgagtgttgttccagtttggaacaagagtccactattaaagaacgtggactccaacgtcaaagggcgaaaaaccgtctatcagggcgatggcccactacgtgaaccatcaccctaatcaagttttttggggtcgaggtgccgtaaagcactaaatcggaaccctaaagggagcccccgatttagagcttgacggggaaagccggcgaacgtggcgagaaaggaagggaagaaagcgaaaggagcgggcgctagggcgctggcaagtgtagcggtcacgctgcgcgtaaccaccacacccgccgcgcttaatgcgccgctacagggcgcgtcaggtg

SEQ ID NO: 3044 - DNA, 5327 bp, Artificial Sequence
  Synthetic Construct, AS-44 intein modified protein encoding nucleic acids in pBluescript
gcacttttcggggaaatgtgcgcggaacccctatttgtttatttttctaaatacattcaaatatgtatccgctcatgagacaataaccctgataaatgcttcaataatattgaaaaaggaagagtatgagtattcaacatttccgtgtcgcccttattcccttttttgcggcattttgccttcctgtttttgctcacccagaaacgctggtgaaagtaaaagatgctgaagatcagttgggtgcacgagtgggttacatcgaactggatctcaacagcggtaagatccttgagagttttcgccccgaagaacgttttccaatgatgagcacttttaaagttctgctatgtggcgcggtattatcccgtattgacgccgggcaagagcaactcggtcgccgcatacactattctcagaatgacttggttgagtactcaccagtcacagaaaagcatcttacggatggcatgacagtaagagaattatgcagtgctgccataaccatgagtgataacactgcggccaacttacttctgacaacgatcggaggaccgaaggagctaaccgcttttttgcacaacatgggggatcatgtaactcgccttgatcgttgggaaccggagctgaatgaagccataccaaacgacgagcgtgacaccacgatgcctgtagcaatggcaacaacgttgcgcaaactattaactggcgaactacttactctagcttcccggcaacaattaatagactggatggaggcggataaagttgcaggaccacttctgcgctcggcccttccggctggctggtttattgctgataaatctggagccggtgagcgtgggtctcgcggtatcattgcagcactggggccagatggtaagccctcccgtatcgtagttatctacacgacggggagtcaggcaactatggatgaacgaaatagacagatcgctgagataggtgcctcactgattaagcattggtaactgtcagaccaagtttactcatatatactttagattgatttaaaacttcatttttaatttaaaaggatctaggtgaagatcctttttgataatctcatgaccaaaatcccttaacgtgagttttcgttccactgagcgtcagaccccgtagaaaagatcaaaggatcttcttgagatcctttttttctgcgcgtaatctgctgcttgcaaacaaaaaaaccaccgctaccagcggtggtttgtttgccggatcaagagctaccaactctttttccgaaggtaactggcttcagcagagcgcagataccaaatactgtccttctagtgtagccgtagttaggccaccacttcaagaactctgtagcaccgcctacatacctcgctctgctaatcctgttaccagtggctgctgccagtggcgataagtcgtgtcttaccgggttggactcaagacgatagttaccggataaggcgcagcggtcgggctgaacggggggttcgtgcacacagcccagcttggagcgaacgacctacaccgaactgagatacctacagcgtgagctatgagaaagcgccacgcttcccgaagggagaaaggcggacaggtatccggtaagcggcagggtcggaacaggagagcgcacgagggagcttccagggggaaacgcctggtatctttatagtcctgtcgggtttcgccacctctgacttgagcgtcgatttttgtgatgctcgtcaggggggcggagcctatggaaaaacgccagcaacgcggcctttttacggttcctggccttttgctggccttttgctcacatgttctttcctgcgttatcccctgattctgtggataaccgtattaccgcctttgagtgagctgataccgctcgccgcagccgaacgaccgagcgcagcgagtcagtgagcgaggaagcggaagagcgcccaatacgcaaaccgcctctccccgcgcgttggccgattcattaatgcagctggcacgacaggtttcccgactggaaagcgggcagtgagcgcaacgcaattaatgtgagttagctcactcattaggcaccccaggctttacactttatgcttccggctcgtatgttgtgtggaattgtgagcggataacaatttcacacaggaaacagcatatgcaaacaagcattactctgacatccaacgcatccggtacgtttgacggttactattacgaactctggaaggatactggcaatacaacaatgacggtctacactcaaggtcgcttttcctgccagtggtcgaacatcaataacgcgttgtttaggaccgggaagaaatacaaccagaattggcagtctcttggcacaatccggatcacgtactctgcgacttacaacccaaacgggaactcctacttgtgtatctatggctggtctaccaacccattggtcgagttctacatcgttgagtcctgggggaactggagaccgcctggtgccacgtccctgggccaagtgacaatcgatggcgggacctacgacatctataggacgacacgcgtcaaccagccttgcctgcaccctgacacatacgttattctccctgacgggcgcatgaagaagatttcggagattgatgaggatgaggttctctcagtcaacttcgaggacctgaagctctacaataagaagatcaagaagttcaagcacaaggctccgaagatcctctacaagattaagaccgcgttctccgagctcatcaccacgggcgagcataagctgttcgtggtcgagaacgggaagatcgtcgagaagtgcgttaaggacctcaatggcagcgagctgatcggggttgtgaggaagctgaactactcgttcaacgacaatgtcgagttcaaggatgtctacgttgagcgccactacaagctcgacgagacaatcaggaacaagctgcgcaaggtgagggagaagctgggcctcactcggaaggatgtggagaagctctgcggggtcaaggagatctacattgttaagatcgagacaggcaagctggagtcaattgaggaggagcggctgaagaagctctgctccctgtacgggatcaacttcgaggagatcatctaccgcgacaacctccactacactaatccagtcaagttccctaagacaccgactcccgagctgatgcagatcattggctacatcattggcgacgggcatttcccctcgaatcggatgctgcgcctcaaggatgagcgcaaggaggtcctggaggagtacaaccagctgttcaagacggtgttcaacctggagggcaatatcaagaagggcgacgggaactactacatcctggagatcaacagcaagtacctgatcgattggttcagggagaacattccggagctcttcaacaagacaggcaatgagaggactcccgagttcgtgttccggctcaacaatgacctggtcgcttcttacctgcggggcatcttcgatgccgaggggtacattcgcgccgaggcgaagcagatcggcattgggatgacatcaaagtgcttcatcaaggagattcagttcctcctgctcaggttcggcatcctcgcctcctacagcaagattaagcggaaggaggagaactggaacaatacccataagctgctcatctcggacaagaagtctttcgagctgttcaagaagtacatcggcttcacggcgaaggataagatggagaagctggaggctatcctgaacaagatgaagggcctcaatttccgctacatctccattccactgaccaagaaggagatcagggagttcgtgggcgtccctctgaagacgattaagaacggggacaattactgcaccgattacacgatcgagaagatcattgaggagctcaactccaagggcctgtacgacaaggccgagtacctcaagcgcttcctggacgcggatatcgtttggacgaagttcaagattgaggaggtggagagcgatgttgagtatgtgtacgatctggaggtggaggactaccacaacttcattggcaatctcatcatcaaccacaactccattgtggggacagccacgttcgatcagtactggagcgtgcgcacctctaagcggacttcaggaacagtgaccgtgaccgatcacttccgcgcctgggcgaaccggggcctgaacctcggcacaatagaccaaattacattgtgcgtggagggttaccaaagctctggatcagccaacatcacccagaacaccttctctcagggctcttcttccggcagttcgggtggctcatccggctccacaacgactactcgcatcgagtgtgagaacatgtccttgtccggaccctacgttagcaggatcaccaatccctttaatggtattgcgctgtacgccaacggagacacagcccgcgctaccgttaacttccccgcaagtcgcaactacaatttccgcctgcggggttgcggcaacaacaataatcttgcccgtgtggacctgaggatcgacggacggaccgtcgggaccttttattaccagggcacatacccctgggaggccccaattgacaatgtttatgtcagtgcggggagtcatacagtcgaaatcactgttactgcggataacggcacatgggacgtgtatgccgactacctggtgatacagtgactcgagggggggcccggtacccaattcgccctatagtgagtcgtattacaattcactggccgtcgttttacaacgtcgtgactgggaaaaccctggcgttacccaacttaatcgccttgcagcacatccccctttcgccagctggcgtaatagcgaagaggcccgcaccgatcgcccttcccaacagttgcgcagcctgaatggcgaatggaaattgtaagcgttaatattttgttaaaattcgcgttaaatttttgttaaatcagctcattttttaaccaataggccgaaatcggcaaaatcccttataaatcaaaagaatagaccgagatagggttgagtgttgttccagtttggaacaagagtccactattaaagaacgtggactccaacgtcaaagggcgaaaaaccgtctatcagggcgatggcccactacgtgaaccatcaccctaatcaagttttttggggtcgaggtgccgtaaagcactaaatcggaaccctaaagggagcccccgatttagagcttgacggggaaagccggcgaacgtggcgagaaaggaagggaagaaagcgaaaggagcgggcgctagggcgctggcaagtgtagcggtcacgctgcgcgtaaccaccacacccgccgcgcttaatgcgccgctacagggcgcgtcaggtg

SEQ ID NO: 3045 - DNA, 5333 bp, Artificial Sequence
  Synthetic Construct, AS-45 intein modified protein encoding nucleic acids in pBluescript
gcacttttcggggaaatgtgcgcggaacccctatttgtttatttttctaaatacattcaaatatgtatccgctcatgagacaataaccctgataaatgcttcaataatattgaaaaaggaagagtatgagtattcaacatttccgtgtcgcccttattcccttttttgcggcattttgccttcctgtttttgctcacccagaaacgctggtgaaagtaaaagatgctgaagatcagttgggtgcacgagtgggttacatcgaactggatctcaacagcggtaagatccttgagagttttcgccccgaagaacgttttccaatgatgagcacttttaaagttctgctatgtggcgcggtattatcccgtattgacgccgggcaagagcaactcggtcgccgcatacactattctcagaatgacttggttgagtactcaccagtcacagaaaagcatcttacggatggcatgacagtaagagaattatgcagtgctgccataaccatgagtgataacactgcggccaacttacttctgacaacgatcggaggaccgaaggagctaaccgcttttttgcacaacatgggggatcatgtaactcgccttgatcgttgggaaccggagctgaatgaagccataccaaacgacgagcgtgacaccacgatgcctgtagcaatggcaacaacgttgcgcaaactattaactggcgaactacttactctagcttcccggcaacaattaatagactggatggaggcggataaagttgcaggaccacttctgcgctcggcccttccggctggctggtttattgctgataaatctggagccggtgagcgtgggtctcgcggtatcattgcagcactggggccagatggtaagccctcccgtatcgtagttatctacacgacggggagtcaggcaactatggatgaacgaaatagacagatcgctgagataggtgcctcactgattaagcattggtaactgtcagaccaagtttactcatatatactttagattgatttaaaacttcatttttaatttaaaaggatctaggtgaagatcctttttgataatctcatgaccaaaatcccttaacgtgagttttcgttccactgagcgtcagaccccgtagaaaagatcaaaggatcttcttgagatcctttttttctgcgcgtaatctgctgcttgcaaacaaaaaaaccaccgctaccagcggtggtttgtttgccggatcaagagctaccaactctttttccgaaggtaactggcttcagcagagcgcagataccaaatactgtccttctagtgtagccgtagttaggccaccacttcaagaactctgtagcaccgcctacatacctcgctctgctaatcctgttaccagtggctgctgccagtggcgataagtcgtgtcttaccgggttggactcaagacgatagttaccggataaggcgcagcggtcgggctgaacggggggttcgtgcacacagcccagcttggagcgaacgacctacaccgaactgagatacctacagcgtgagctatgagaaagcgccacgcttcccgaagggagaaaggcggacaggtatccggtaagcggcagggtcggaacaggagagcgcacgagggagcttccagggggaaacgcctggtatctttatagtcctgtcgggtttcgccacctctgacttgagcgtcgatttttgtgatgctcgtcaggggggcggagcctatggaaaaacgccagcaacgcggcctttttacggttcctggccttttgctggccttttgctcacatgttctttcctgcgttatcccctgattctgtggataaccgtattaccgcctttgagtgagctgataccgctcgccgcagccgaacgaccgagcgcagcgagtcagtgagcgaggaagcggaagagcgcccaatacgcaaaccgcctctccccgcgcgttggccgattcattaatgcagctggcacgacaggtttcccgactggaaagcgggcagtgagcgcaacgcaattaatgtgagttagctcactcattaggcaccccaggctttacactttatgcttccggctcgtatgttgtgtggaattgtgagcggataacaatttcacacaggaaacagcatatgcaaacaagcattactctgacatccaacgcatccggtacgtttgacggttactattacgaactctggaaggatactggcaatacaacaatgacggtctacactcaaggtcgcttttcctgccagtggtcgaacatcaataacgcgttgtttaggaccgggaagaaatacaaccagaattggcagtctcttggcacaatccggatcacgtactctgcgacttacaacccaaacgggaactcctacttgtgtatctatggctggtctaccaacccattggtcgagttctacatcgttgagtcctgggggaactggagaccgcctggtgccacgtccctgggccaagtgacaatcgatggcgggacctacgacatctataggacgacacgcgtcaaccagccttgcctcaacgctaacactgagattctgcaggagtcggggttccgcaagattacggagctgaataaggatgagaaggttttcgcgctgtgcggcaaggagatcaagccagtcgacgggtggaaggttcacaagacgcctcagcatgagtacaacatcgtggtcaagacagtcaatggcctggagattaccacgacaccaaaccacatcttcctcgttaaggagaatggctcgctgaaggagaaggaggccaaggacctgaaggttggggattacgttgcgacggtggaccggattcgcgtgaaggagaaggacatcgatctctctaacggcgacctgtacttcattgggtacttcatcggcgatgggtacacaggcgtgatcgagaagaacacgctcaaggctacaccggatctggccttcaaccccaagtacccgcccaatttcgacgattcggagctccacaagaagtacttcctgaagtgccggatttcaaagggcgtcgctcattacatctactccaagaagctccgcaagattttcaacaagctcaatatgctgaccaaggacaacaagaatatcgatgcgttctgcaacctcccgctggacaagctcgcctacctgatcgcgggcctcttcgactccgatgggtacatctacctgaaccggaagaatattgagttctactcgatctctgagaagctcgtggagcagctgcagttcgtcctcctgcggttcggcattcactccagcatccgcaagaagaagaccaagaccatggtgtccccaactaacgggaaggagtacaagtgcaaggacatctacgtcctcaccatccgcgatttcatgagcattaagaggttctacgagaacatccctctccgccatgaggagaagcgcaggaagctggaggagatcattaagaataaggagatcggccagattccgtctgagttcgttgcgctgaggttcacccccatcgctaagatttggtgcgactgcggcttctcagtggatctcactatgttcaagccgcgcaccaagaggcagcgggagctgaacaagaagagggtgaagctcctgttcgagctcctggacggcaagaagctcatcacgaactacaaggagtactacagcaagaggaagaatccctacttcgatttcattgtccgggagaagatcaacggcaacaattactacagcctcaatgagaaggggagggttctgatgtcgctcctgaacaagcacatcaaggacaaggagaatctggaggagatgtacaacttcctcgtgaatctggagaagtgcccaatttgcggcaagcctatccataaggagatgaggtactcctggaagaaggagtgctacgacggggatatctactgggaccggatcaaggagattaagaagatcaaggtcaacgacaagtacgcctacgatatcgagctgccagatgacgggtctaattcacactacatcgttgctaacggcttcatcgtgcataactccattgtggggacagccacgttcgatcagtactggagcgtgcgcacctctaagcggacttcaggaacagtgaccgtgaccgatcacttccgcgcctgggcgaaccggggcctgaacctcggcacaatagaccaaattacattgtgcgtggagggttaccaaagctctggatcagccaacatcacccagaacaccttctctcagggctcttcttccggcagttcgggtggctcatccggctccacaacgactactcgcatcgagtgtgagaacatgtccttgtccggaccctacgttagcaggatcaccaatccctttaatggtattgcgctgtacgccaacggagacacagcccgcgctaccgttaacttccccgcaagtcgcaactacaatttccgcctgcggggttgcggcaacaacaataatcttgcccgtgtggacctgaggatcgacggacggaccgtcgggaccttttattaccagggcacatacccctgggaggccccaattgacaatgtttatgtcagtgcggggagtcatacagtcgaaatcactgttactgcggataacggcacatgggacgtgtatgccgactacctggtgatacagtgactcgagggggggcccggtacccaattcgccctatagtgagtcgtattacaattcactggccgtcgttttacaacgtcgtgactgggaaaaccctggcgttacccaacttaatcgccttgcagcacatccccctttcgccagctggcgtaatagcgaagaggcccgcaccgatcgcccttcccaacagttgcgcagcctgaatggcgaatggaaattgtaagcgttaatattttgttaaaattcgcgttaaatttttgttaaatcagctcattttttaaccaataggccgaaatcggcaaaatcccttataaatcaaaagaatagaccgagatagggttgagtgttgttccagtttggaacaagagtccactattaaagaacgtggactccaacgtcaaagggcgaaaaaccgtctatcagggcgatggcccactacgtgaaccatcaccctaatcaagttttttggggtcgaggtgccgtaaagcactaaatcggaaccctaaagggagcccccgatttagagcttgacggggaaagccggcgaacgtggcgagaaaggaagggaagaaagcgaaaggagcgggcgctagggcgctggcaagtgtagcggtcacgctgcgcgtaaccaccacacccgccgcgcttaatgcgccgctacagggcgcgtcaggtg

SEQ ID NO: 3046 - DNA, 5006 bp, Artificial Sequence
  Synthetic Construct, AS-46 intein modified protein encoding nucleic acids in pBluescript
gcacttttcggggaaatgtgcgcggaacccctatttgtttatttttctaaatacattcaaatatgtatccgctcatgagacaataaccctgataaatgcttcaataatattgaaaaaggaagagtatgagtattcaacatttccgtgtcgcccttattcccttttttgcggcattttgccttcctgtttttgctcacccagaaacgctggtgaaagtaaaagatgctgaagatcagttgggtgcacgagtgggttacatcgaactggatctcaacagcggtaagatccttgagagttttcgccccgaagaacgttttccaatgatgagcacttttaaagttctgctatgtggcgcggtattatcccgtattgacgccgggcaagagcaactcggtcgccgcatacactattctcagaatgacttggttgagtactcaccagtcacagaaaagcatcttacggatggcatgacagtaagagaattatgcagtgctgccataaccatgagtgataacactgcggccaacttacttctgacaacgatcggaggaccgaaggagctaaccgcttttttgcacaacatgggggatcatgtaactcgccttgatcgttgggaaccggagctgaatgaagccataccaaacgacgagcgtgacaccacgatgcctgtagcaatggcaacaacgttgcgcaaactattaactggcgaactacttactctagcttcccggcaacaattaatagactggatggaggcggataaagttgcaggaccacttctgcgctcggcccttccggctggctggtttattgctgataaatctggagccggtgagcgtgggtctcgcggtatcattgcagcactggggccagatggtaagccctcccgtatcgtagttatctacacgacggggagtcaggcaactatggatgaacgaaatagacagatcgctgagataggtgcctcactgattaagcattggtaactgtcagaccaagtttactcatatatactttagattgatttaaaacttcatttttaatttaaaaggatctaggtgaagatcctttttgataatctcatgaccaaaatcccttaacgtgagttttcgttccactgagcgtcagaccccgtagaaaagatcaaaggatcttcttgagatcctttttttctgcgcgtaatctgctgcttgcaaacaaaaaaaccaccgctaccagcggtggtttgtttgccggatcaagagctaccaactctttttccgaaggtaactggcttcagcagagcgcagataccaaatactgtccttctagtgtagccgtagttaggccaccacttcaagaactctgtagcaccgcctacatacctcgctctgctaatcctgttaccagtggctgctgccagtggcgataagtcgtgtcttaccgggttggactcaagacgatagttaccggataaggcgcagcggtcgggctgaacggggggttcgtgcacacagcccagcttggagcgaacgacctacaccgaactgagatacctacagcgtgagctatgagaaagcgccacgcttcccgaagggagaaaggcggacaggtatccggtaagcggcagggtcggaacaggagagcgcacgagggagcttccagggggaaacgcctggtatctttatagtcctgtcgggtttcgccacctctgacttgagcgtcgatttttgtgatgctcgtcaggggggcggagcctatggaaaaacgccagcaacgcggcctttttacggttcctggccttttgctggccttttgctcacatgttctttcctgcgttatcccctgattctgtggataaccgtattaccgcctttgagtgagctgataccgctcgccgcagccgaacgaccgagcgcagcgagtcagtgagcgaggaagcggaagagcgcccaatacgcaaaccgcctctccccgcgcgttggccgattcattaatgcagctggcacgacaggtttcccgactggaaagcgggcagtgagcgcaacgcaattaatgtgagttagctcactcattaggcaccccaggctttacactttatgcttccggctcgtatgttgtgtggaattgtgagcggataacaatttcacacaggaaacagcatatgcaaacaagcattactctgacatccaacgcatccggtacgtttgacggttactattacgaactctggaaggatactggcaatacaacaatgacggtctacactcaaggtcgcttttcctgccagtggtcgaacatcaataacgcgttgtttaggaccgggaagaaatacaaccagaattggcagtctcttggcacaatccggatcacgtactctgcgacttacaacccaaacgggaactcctacttgtgtatctatggctggtctaccaacccattggtcgagttctacatcgttgagtcctgggggaactggagaccgcctggtgccacgtccctgggccaagtgacaatcgatggcgggacctacgacatctataggacgacacgcgtcaaccagccttgcgttccgcctgacactctgctcatcctggagaatgggttcaagcgcatcgtggacattaaggtcggggacaaggtcctgacgcacgagaaccggttcaagaaggttgagaaggtgtacaagcgcaggtacatcggcgacatcattaagattaaggtgcgctacttcccagaggagatcattctcaccccagagcaccctgtctacgctatcaagacggagaagaggtgcgatggctctcatgggatctgcaagttcaactgcctcacacagtacactaatccttcatgcaagaagcggtaccgcaagtacaagagggagtggatcattgccaaggacctgaaggtcggcgatgtgatcgtctacccgattcccaacagggttcgggacatcaagtacctctccctggataagtacctcagcaatatcaagagggagttctgccgctcccgcatcccggagaagattgaggtctctgaggagttctgccgcctcgttggctacttcctgtccgaggggtactgcttcagggacggcatcgggttcgctctgggcgagaacgagaagaagatcattgacgatatcgagtacctcatgaagaagattttcaatctgaagcccaagatccgcgacgatggccgctcagaggggatcgagctcaagtactactcccgggtgctgcgcgacttcttcggcgatatgttctactgcggggacgagaagcgggcctggaacaaggcgctcccaaatgagttcctctacctgcctaagaacaagcagctgcagatcttcattggctggtggaggggcgataagggggtcaccacgtcggagattctgatgaaccagctcaggctgatcagcctccggctgggcttcatcattaccttctcgaagcacgttccgaagaatcccaagatcggcgacagggaggtcatcaagtaccatgctaggtggcagggccgcgtgtccatcctcgacgagaagattgtcgatgagctcaagaacgaggacatcaagctgccgaagaaggatgttcgctacggctggatcaaggggaattacctgtacgctcccatcattaggatcggccgggagtactacgacgggttcgtctacaatctggaggtggaggatgactcttcatacgttacagtctcaggcactctgcacaactccattgtggggacagccacgttcgatcagtactggagcgtgcgcacctctaagcggacttcaggaacagtgaccgtgaccgatcacttccgcgcctgggcgaaccggggcctgaacctcggcacaatagaccaaattacattgtgcgtggagggttaccaaagctctggatcagccaacatcacccagaacaccttctctcagggctcttcttccggcagttcgggtggctcatccggctccacaacgactactcgcatcgagtgtgagaacatgtccttgtccggaccctacgttagcaggatcaccaatccctttaatggtattgcgctgtacgccaacggagacacagcccgcgctaccgttaacttccccgcaagtcgcaactacaatttccgcctgcggggttgcggcaacaacaataatcttgcccgtgtggacctgaggatcgacggacggaccgtcgggaccttttattaccagggcacatacccctgggaggccccaattgacaatgtttatgtcagtgcggggagtcatacagtcgaaatcactgttactgcggataacggcacatgggacgtgtatgccgactacctggtgatacagtgactcgagggggggcccggtacccaattcgccctatagtgagtcgtattacaattcactggccgtcgttttacaacgtcgtgactgggaaaaccctggcgttacccaacttaatcgccttgcagcacatccccctttcgccagctggcgtaatagcgaagaggcccgcaccgatcgcccttcccaacagttgcgcagcctgaatggcgaatggaaattgtaagcgttaatattttgttaaaattcgcgttaaatttttgttaaatcagctcattttttaaccaataggccgaaatcggcaaaatcccttataaatcaaaagaatagaccgagatagggttgagtgttgttccagtttggaacaagagtccactattaaagaacgtggactccaacgtcaaagggcgaaaaaccgtctatcagggcgatggcccactacgtgaaccatcaccctaatcaagttttttggggtcgaggtgccgtaaagcactaaatcggaaccctaaagggagcccccgatttagagcttgacggggaaagccggcgaacgtggcgagaaaggaagggaagaaagcgaaaggagcgggcgctagggcgctggcaagtgtagcggtcacgctgcgcgtaaccaccacacccgccgcgcttaatgcgccgctacagggcgcgtcaggtg

SEQ ID NO: 3047 - DNA, 5468 bp, Artificial Sequence
  Synthetic Construct, AS-47 intein modified protein encoding nucleic acids in pBluescript
gcacttttcggggaaatgtgcgcggaacccctatttgtttatttttctaaatacattcaaatatgtatccgctcatgagacaataaccctgataaatgcttcaataatattgaaaaaggaagagtatgagtattcaacatttccgtgtcgcccttattcccttttttgcggcattttgccttcctgtttttgctcacccagaaacgctggtgaaagtaaaagatgctgaagatcagttgggtgcacgagtgggttacatcgaactggatctcaacagcggtaagatccttgagagttttcgccccgaagaacgttttccaatgatgagcacttttaaagttctgctatgtggcgcggtattatcccgtattgacgccgggcaagagcaactcggtcgccgcatacactattctcagaatgacttggttgagtactcaccagtcacagaaaagcatcttacggatggcatgacagtaagagaattatgcagtgctgccataaccatgagtgataacactgcggccaacttacttctgacaacgatcggaggaccgaaggagctaaccgcttttttgcacaacatgggggatcatgtaactcgccttgatcgttgggaaccggagctgaatgaagccataccaaacgacgagcgtgacaccacgatgcctgtagcaatggcaacaacgttgcgcaaactattaactggcgaactacttactctagcttcccggcaacaattaatagactggatggaggcggataaagttgcaggaccacttctgcgctcggcccttccggctggctggtttattgctgataaatctggagccggtgagcgtgggtctcgcggtatcattgcagcactggggccagatggtaagccctcccgtatcgtagttatctacacgacggggagtcaggcaactatggatgaacgaaatagacagatcgctgagataggtgcctcactgattaagcattggtaactgtcagaccaagtttactcatatatactttagattgatttaaaacttcatttttaatttaaaaggatctaggtgaagatcctttttgataatctcatgaccaaaatcccttaacgtgagttttcgttccactgagcgtcagaccccgtagaaaagatcaaaggatcttcttgagatcctttttttctgcgcgtaatctgctgcttgcaaacaaaaaaaccaccgctaccagcggtggtttgtttgccggatcaagagctaccaactctttttccgaaggtaactggcttcagcagagcgcagataccaaatactgtccttctagtgtagccgtagttaggccaccacttcaagaactctgtagcaccgcctacatacctcgctctgctaatcctgttaccagtggctgctgccagtggcgataagtcgtgtcttaccgggttggactcaagacgatagttaccggataaggcgcagcggtcgggctgaacggggggttcgtgcacacagcccagcttggagcgaacgacctacaccgaactgagatacctacagcgtgagctatgagaaagcgccacgcttcccgaagggagaaaggcggacaggtatccggtaagcggcagggtcggaacaggagagcgcacgagggagcttccagggggaaacgcctggtatctttatagtcctgtcgggtttcgccacctctgacttgagcgtcgatttttgtgatgctcgtcaggggggcggagcctatggaaaaacgccagcaacgcggcctttttacggttcctggccttttgctggccttttgctcacatgttctttcctgcgttatcccctgattctgtggataaccgtattaccgcctttgagtgagctgataccgctcgccgcagccgaacgaccgagcgcagcgagtcagtgagcgaggaagcggaagagcgcccaatacgcaaaccgcctctccccgcgcgttggccgattcattaatgcagctggcacgacaggtttcccgactggaaagcgggcagtgagcgcaacgcaattaatgtgagttagctcactcattaggcaccccaggctttacactttatgcttccggctcgtatgttgtgtggaattgtgagcggataacaatttcacacaggaaacagcatatgcaaacaagcattactctgacatccaacgcatccggtacgtttgacggttactattacgaactctggaaggatactggcaatacaacaatgacggtctacactcaaggtcgcttttcctgccagtggtcgaacatcaataacgcgttgtttaggaccgggaagaaatacaaccagaattggcagtctcttggcacaatccggatcacgtactctgcgacttacaacccaaacgggaactcctacttgtgtatctatggctggtctaccaacccattggtcgagttctacatcgttgagtcctgggggaactggagaccgcctggtgccacgtccctgggccaagtgacaatcgatggcgggacctacgacatctataggacgacacgcgtcaaccagccttgcctgatgccgcatgagaaggtgctgacggagtacggggagattaagattgaggacctgttcaagatcgggaaggagatcgtggagaaggacgagctcaaggagatcaggaagctgaatattaaggtgcacactctcaacgagaatggcgagatcaagatcattaacgccccatacgtgtggaagctcaagcataaggggaagatgatcaaggtcaagctgaagaactggcactcgatcaccacgacaccggagcatcccttcctgaccaacaatggctggatcaaggcggagaatattaagaaggggatgtatgtggctatccctcgcaagatctacggcaacgaggacttcgagaagttcatcgagttcattaattccaagatcctcacgaacgagctgattgtgaaggtcaatgagaaggacctcaagaacgttgagctgccgtcaacaaagatctacaagaagcagaagaacgtgttccgctccgaggatatcattgagcacaacctcaatatcgagaagatttcgttctctccacggatccaccgctgcggcaagccacagcattacatcaagctccctaagtctctgaacgagtggaaggccatcttctacttcgctggcgtgatgttcggcgacgggtgcgtcgatcggatcgcgaacaatgacgaggaggtcttcaacaagctgaagtcactcaacaatctgggcatcgaggttgagaggattaagcggaagtccagctacgagatcattttcaagaacgggaagaatgctctcatcaacctcctgaagattctgttcgattacccgtctgagaagaagtcacataacatcaagattccgcagatcctctacattgctcccaaggagctggtggccgagttcatcaagggctacttcgacgccgatggctacgtgaatctccgccagaacaggatcgaggttatttcagcgtccaaggagttcatcgagggcctgtccattctcctgctccgcttcgagatcacttccaagatctacgagattaagaagagctacaaggagaccaagaagaagtactaccagctcaacatcgtcggcaagaggaacctgaagaatttcaagaacatcgggttctccattaagtacaaggaggagaacctgaataagatcattgagaagagcaggaagtcggagaagtaccccatcaacaaggacatgaagcgcctcaggattctgttcggcatgacgcggaatgaggttaacgtgagctactacgccaagtacgagaacgggaaggagatcccatcgtacgagattgtgaagaagttcctcaattctctgaagcctaagaacctcgataagaagatcaaggttctggagggcaaggagcgcgacgtgaattacctcaaggctttcgagagcgatggcctgatcgagaacgggaggctcaccaagctgggcagggaggccctcaatatctggaagaaccacgagttcgggaaggagaatatcgactacatgaagtcgctgatcgagaacattgcgttcgtcgaggttgaggatgtcgagatcattgactacgatggctacgtttacgatctcacaacagagactcataacttcattgctaatggcatcgtggttcataattccattgtggggacagccacgttcgatcagtactggagcgtgcgcacctctaagcggacttcaggaacagtgaccgtgaccgatcacttccgcgcctgggcgaaccggggcctgaacctcggcacaatagaccaaattacattgtgcgtggagggttaccaaagctctggatcagccaacatcacccagaacaccttctctcagggctcttcttccggcagttcgggtggctcatccggctccacaacgactactcgcatcgagtgtgagaacatgtccttgtccggaccctacgttagcaggatcaccaatccctttaatggtattgcgctgtacgccaacggagacacagcccgcgctaccgttaacttccccgcaagtcgcaactacaatttccgcctgcggggttgcggcaacaacaataatcttgcccgtgtggacctgaggatcgacggacggaccgtcgggaccttttattaccagggcacatacccctgggaggccccaattgacaatgtttatgtcagtgcggggagtcatacagtcgaaatcactgttactgcggataacggcacatgggacgtgtatgccgactacctggtgatacagtgactcgagggggggcccggtacccaattcgccctatagtgagtcgtattacaattcactggccgtcgttttacaacgtcgtgactgggaaaaccctggcgttacccaacttaatcgccttgcagcacatccccctttcgccagctggcgtaatagcgaagaggcccgcaccgatcgcccttcccaacagttgcgcagcctgaatggcgaatggaaattgtaagcgttaatattttgttaaaattcgcgttaaatttttgttaaatcagctcattttttaaccaataggccgaaatcggcaaaatcccttataaatcaaaagaatagaccgagatagggttgagtgttgttccagtttggaacaagagtccactattaaagaacgtggactccaacgtcaaagggcgaaaaaccgtctatcagggcgatggcccactacgtgaaccatcaccctaatcaagttttttggggtcgaggtgccgtaaagcactaaatcggaaccctaaagggagcccccgatttagagcttgacggggaaagccggcgaacgtggcgagaaaggaagggaagaaagcgaaaggagcgggcgctagggcgctggcaagtgtagcggtcacgctgcgcgtaaccaccacacccgccgcgcttaatgcgccgctacagggcgcgtcaggtg

SEQ ID NO: 3048 - DNA, 4334 bp, Artificial Sequence
  Synthetic Construct, AS-48 intein modified protein encoding nucleic acids in pBluescript
gcacttttcggggaaatgtgcgcggaacccctatttgtttatttttctaaatacattcaaatatgtatccgctcatgagacaataaccctgataaatgcttcaataatattgaaaaaggaagagtatgagtattcaacatttccgtgtcgcccttattcccttttttgcggcattttgccttcctgtttttgctcacccagaaacgctggtgaaagtaaaagatgctgaagatcagttgggtgcacgagtgggttacatcgaactggatctcaacagcggtaagatccttgagagttttcgccccgaagaacgttttccaatgatgagcacttttaaagttctgctatgtggcgcggtattatcccgtattgacgccgggcaagagcaactcggtcgccgcatacactattctcagaatgacttggttgagtactcaccagtcacagaaaagcatcttacggatggcatgacagtaagagaattatgcagtgctgccataaccatgagtgataacactgcggccaacttacttctgacaacgatcggaggaccgaaggagctaaccgcttttttgcacaacatgggggatcatgtaactcgccttgatcgttgggaaccggagctgaatgaagccataccaaacgacgagcgtgacaccacgatgcctgtagcaatggcaacaacgttgcgcaaactattaactggcgaactacttactctagcttcccggcaacaattaatagactggatggaggcggataaagttgcaggaccacttctgcgctcggcccttccggctggctggtttattgctgataaatctggagccggtgagcgtgggtctcgcggtatcattgcagcactggggccagatggtaagccctcccgtatcgtagttatctacacgacggggagtcaggcaactatggatgaacgaaatagacagatcgctgagataggtgcctcactgattaagcattggtaactgtcagaccaagtttactcatatatactttagattgatttaaaacttcatttttaatttaaaaggatctaggtgaagatcctttttgataatctcatgaccaaaatcccttaacgtgagttttcgttccactgagcgtcagaccccgtagaaaagatcaaaggatcttcttgagatcctttttttctgcgcgtaatctgctgcttgcaaacaaaaaaaccaccgctaccagcggtggtttgtttgccggatcaagagctaccaactctttttccgaaggtaactggcttcagcagagcgcagataccaaatactgtccttctagtgtagccgtagttaggccaccacttcaagaactctgtagcaccgcctacatacctcgctctgctaatcctgttaccagtggctgctgccagtggcgataagtcgtgtcttaccgggttggactcaagacgatagttaccggataaggcgcagcggtcgggctgaacggggggttcgtgcacacagcccagcttggagcgaacgacctacaccgaactgagatacctacagcgtgagctatgagaaagcgccacgcttcccgaagggagaaaggcggacaggtatccggtaagcggcagggtcggaacaggagagcgcacgagggagcttccagggggaaacgcctggtatctttatagtcctgtcgggtttcgccacctctgacttgagcgtcgatttttgtgatgctcgtcaggggggcggagcctatggaaaaacgccagcaacgcggcctttttacggttcctggccttttgctggccttttgctcacatgttctttcctgcgttatcccctgattctgtggataaccgtattaccgcctttgagtgagctgataccgctcgccgcagccgaacgaccgagcgcagcgagtcagtgagcgaggaagcggaagagcgcccaatacgcaaaccgcctctccccgcgcgttggccgattcattaatgcagctggcacgacaggtttcccgactggaaagcgggcagtgagcgcaacgcaattaatgtgagttagctcactcattaggcaccccaggctttacactttatgcttccggctcgtatgttgtgtggaattgtgagcggataacaatttcacacaggaaacagcatatgcaaacaagcattactctgacatccaacgcatccggtacgtttgacggttactattacgaactctggaaggatactggcaatacaacaatgacggtctacactcaaggtcgcttttcctgccagtggtcgaacatcaataacgcgttgtttaggaccgggaagaaatacaaccagaattggcagtctcttggcacaatccggatcacgtactctgcgacttacaacccaaacgggaactcctacttgtgtatctatggctggtctaccaacccattggtcgagttctacatcgttgagtcctgggggaactggagaccgcctggtgccacgtccctgggccaagtgacaatcgatggcgggacctacgacatctataggacgacacgcgtcaaccagcctgctctcgcctacgatgagcctatctacctctcggatggcaacattatcaatatcggggagttcgtggataagttcttcaagaagtacaagaacagcatcaagaaggaggacaatggcttcgggtggatcgatattggcaacgagaatatctacattaagtccttcaacaagctcagcctgatcattgaggacaagcggatcctccgcgtctggcgcaagaagtactcggggaagctgatcaagattaccacgaagaaccgcagggagatcacactcactcacgatcatccggtttacatctctaagaccggcgaggtgctggagattaatgccgagatggtgaaggtcggggactacatctacattcccaagaacaataccatcaacctcgatgaggttattaaggtggagacggtcgactacaatggccacatctacgatctgactgtggaggataatcatacttacattgctggcaagaatgagggcttcgctgtttccaactccattgtggggacagccacgttcgatcagtactggagcgtgcgcacctctaagcggacttcaggaacagtgaccgtgaccgatcacttccgcgcctgggcgaaccggggcctgaacctcggcacaatagaccaaattacattgtgcgtggagggttaccaaagctctggatcagccaacatcacccagaacaccttctctcagggctcttcttccggcagttcgggtggctcatccggctccacaacgactactcgcatcgagtgtgagaacatgtccttgtccggaccctacgttagcaggatcaccaatccctttaatggtattgcgctgtacgccaacggagacacagcccgcgctaccgttaacttccccgcaagtcgcaactacaatttccgcctgcggggttgcggcaacaacaataatcttgcccgtgtggacctgaggatcgacggacggaccgtcgggaccttttattaccagggcacatacccctgggaggccccaattgacaatgtttatgtcagtgcggggagtcatacagtcgaaatcactgttactgcggataacggcacatgggacgtgtatgccgactacctggtgatacagtgactcgagggggggcccggtacccaattcgccctatagtgagtcgtattacaattcactggccgtcgttttacaacgtcgtgactgggaaaaccctggcgttacccaacttaatcgccttgcagcacatccccctttcgccagctggcgtaatagcgaagaggcccgcaccgatcgcccttcccaacagttgcgcagcctgaatggcgaatggaaattgtaagcgttaatattttgttaaaattcgcgttaaatttttgttaaatcagctcattttttaaccaataggccgaaatcggcaaaatcccttataaatcaaaagaatagaccgagatagggttgagtgttgttccagtttggaacaagagtccactattaaagaacgtggactccaacgtcaaagggcgaaaaaccgtctatcagggcgatggcccactacgtgaaccatcaccctaatcaagttttttggggtcgaggtgccgtaaagcactaaatcggaaccctaaagggagcccccgatttagagcttgacggggaaagccggcgaacgtggcgagaaaggaagggaagaaagcgaaaggagcgggcgctagggcgctggcaagtgtagcggtcacgctgcgcgtaaccaccacacccgccgcgcttaatgcgccgctacagggcgcgtcaggtg

SEQ ID NO: 3049 - DNA, 5066 bp, Artificial Sequence
  Synthetic Construct, AS-49 intein modified protein encoding nucleic acids in pBluescript
gcacttttcggggaaatgtgcgcggaacccctatttgtttatttttctaaatacattcaaatatgtatccgctcatgagacaataaccctgataaatgcttcaataatattgaaaaaggaagagtatgagtattcaacatttccgtgtcgcccttattcccttttttgcggcattttgccttcctgtttttgctcacccagaaacgctggtgaaagtaaaagatgctgaagatcagttgggtgcacgagtgggttacatcgaactggatctcaacagcggtaagatccttgagagttttcgccccgaagaacgttttccaatgatgagcacttttaaagttctgctatgtggcgcggtattatcccgtattgacgccgggcaagagcaactcggtcgccgcatacactattctcagaatgacttggttgagtactcaccagtcacagaaaagcatcttacggatggcatgacagtaagagaattatgcagtgctgccataaccatgagtgataacactgcggccaacttacttctgacaacgatcggaggaccgaaggagctaaccgcttttttgcacaacatgggggatcatgtaactcgccttgatcgttgggaaccggagctgaatgaagccataccaaacgacgagcgtgacaccacgatgcctgtagcaatggcaacaacgttgcgcaaactattaactggcgaactacttactctagcttcccggcaacaattaatagactggatggaggcggataaagttgcaggaccacttctgcgctcggcccttccggctggctggtttattgctgataaatctggagccggtgagcgtgggtctcgcggtatcattgcagcactggggccagatggtaagccctcccgtatcgtagttatctacacgacggggagtcaggcaactatggatgaacgaaatagacagatcgctgagataggtgcctcactgattaagcattggtaactgtcagaccaagtttactcatatatactttagattgatttaaaacttcatttttaatttaaaaggatctaggtgaagatcctttttgataatctcatgaccaaaatcccttaacgtgagttttcgttccactgagcgtcagaccccgtagaaaagatcaaaggatcttcttgagatcctttttttctgcgcgtaatctgctgcttgcaaacaaaaaaaccaccgctaccagcggtggtttgtttgccggatcaagagctaccaactctttttccgaaggtaactggcttcagcagagcgcagataccaaatactgtccttctagtgtagccgtagttaggccaccacttcaagaactctgtagcaccgcctacatacctcgctctgctaatcctgttaccagtggctgctgccagtggcgataagtcgtgtcttaccgggttggactcaagacgatagttaccggataaggcgcagcggtcgggctgaacggggggttcgtgcacacagcccagcttggagcgaacgacctacaccgaactgagatacctacagcgtgagctatgagaaagcgccacgcttcccgaagggagaaaggcggacaggtatccggtaagcggcagggtcggaacaggagagcgcacgagggagcttccagggggaaacgcctggtatctttatagtcctgtcgggtttcgccacctctgacttgagcgtcgatttttgtgatgctcgtcaggggggcggagcctatggaaaaacgccagcaacgcggcctttttacggttcctggccttttgctggccttttgctcacatgttctttcctgcgttatcccctgattctgtggataaccgtattaccgcctttgagtgagctgataccgctcgccgcagccgaacgaccgagcgcagcgagtcagtgagcgaggaagcggaagagcgcccaatacgcaaaccgcctctccccgcgcgttggccgattcattaatgcagctggcacgacaggtttcccgactggaaagcgggcagtgagcgcaacgcaattaatgtgagttagctcactcattaggcaccccaggctttacactttatgcttccggctcgtatgttgtgtggaattgtgagcggataacaatttcacacaggaaacagcatatgcaaacaagcattactctgacatccaacgcatccggtacgtttgacggttactattacgaactctggaaggatactggcaatacaacaatgacggtctacactcaaggtcgcttttcctgccagtggtcgaacatcaataacgcgttgtttaggaccgggaagaaatacaaccagaattggcagtctcttggcacaatccggatcacgtactctgcgacttacaacccaaacgggaactcctacttgtgtatctatggctggtctaccaacccattggtcgagttctacatcgttgagtcctgggggaactggagaccgcctggtgccacgtccctgggccaagtgacaatcgatggcgggacctacgacatctataggacgacacgcgtcaaccagccttgcattgagggggacgctaagattctgacggatcgggggttcctgaagatgaaggaggtttacaagctcgtgaagaatggggagaagctcaaggtcctcggcctgaatgctgagacactgaagactgagtggaaggagatcattgacgctcagaagagggaggctaggcgctacgagatcggcgtgtaccgcaagaataagaacaccaaggacacgatcaagattacaccggatcacaagttccccgtgttcgtcaacggcgagctcagcaaggtgcagctgtgcgacatcattgataacaatctctcagtcctgtccatcgactacattccaatgatcgaggagaagtacgagtccctcgctgaggtcatgtacctcggcggggctgtcctgagcgatggccatatcgttcggaggaacgggaagccaattcgggtccgcttcacacagaaggacactgaggagaagaaggatttcatcgagaaggttaagggcgacgtgaagctcatcggcgggaatttcatcgagatttcgaaccgcaacaatgtcatcgagtaccagacctctaggaagattccgtcagagatcctgggcttcattgaggttaatattaacacaatccccctctacgccactaaggacgagatcgccgatctgattgcgggcttcgttgacggcgatgggtgcctctccgggaagaggagggtggagatctaccagaactccagccacattaagaagatcgagggcctcatcgtcgggctctacaggctgggcatcattccgaggctgcggtacaagcggtcgtctaccgcgacgatctacttcaacaacaacctggagaccatcctgcagcgcacgcgcaggattaagctcgacaagctgaaggagttcaagaagccagtggaggacaagaagctgatcgatatttcgcagatcctccctgagctgaaggagttcgactacaagggctacctctacaagacctacaaggagaagctgttcatcgggattaacaagctggaggagtacctgtctaagatcgacaaggatggcattgagcgcatcaagcagaagatcaagctcctgaaggagagcgacatctactcgatcaggattaagaaggtcggcgaggattacggggaggtctacaatatcacggttaaggcggagaacgagttcaatcataactacgtggtttggactaagcattacacacctatcgtggttttcaactccattgtggggacagccacgttcgatcagtactggagcgtgcgcacctctaagcggacttcaggaacagtgaccgtgaccgatcacttccgcgcctgggcgaaccggggcctgaacctcggcacaatagaccaaattacattgtgcgtggagggttaccaaagctctggatcagccaacatcacccagaacaccttctctcagggctcttcttccggcagttcgggtggctcatccggctccacaacgactactcgcatcgagtgtgagaacatgtccttgtccggaccctacgttagcaggatcaccaatccctttaatggtattgcgctgtacgccaacggagacacagcccgcgctaccgttaacttccccgcaagtcgcaactacaatttccgcctgcggggttgcggcaacaacaataatcttgcccgtgtggacctgaggatcgacggacggaccgtcgggaccttttattaccagggcacatacccctgggaggccccaattgacaatgtttatgtcagtgcggggagtcatacagtcgaaatcactgttactgcggataacggcacatgggacgtgtatgccgactacctggtgatacagtgactcgagggggggcccggtacccaattcgccctatagtgagtcgtattacaattcactggccgtcgttttacaacgtcgtgactgggaaaaccctggcgttacccaacttaatcgccttgcagcacatccccctttcgccagctggcgtaatagcgaagaggcccgcaccgatcgcccttcccaacagttgcgcagcctgaatggcgaatggaaattgtaagcgttaatattttgttaaaattcgcgttaaatttttgttaaatcagctcattttttaaccaataggccgaaatcggcaaaatcccttataaatcaaaagaatagaccgagatagggttgagtgttgttccagtttggaacaagagtccactattaaagaacgtggactccaacgtcaaagggcgaaaaaccgtctatcagggcgatggcccactacgtgaaccatcaccctaatcaagttttttggggtcgaggtgccgtaaagcactaaatcggaaccctaaagggagcccccgatttagagcttgacggggaaagccggcgaacgtggcgagaaaggaagggaagaaagcgaaaggagcgggcgctagggcgctggcaagtgtagcggtcacgctgcgcgtaaccaccacacccgccgcgcttaatgcgccgctacagggcgcgtcaggtg

SEQ ID NO: 3050 - DNA, 4937 bp, Artificial Sequence
  Synthetic Construct, AS-50 intein modified protein encoding nucleic acids in pBluescript
gcacttttcggggaaatgtgcgcggaacccctatttgtttatttttctaaatacattcaaatatgtatccgctcatgagacaataaccctgataaatgcttcaataatattgaaaaaggaagagtatgagtattcaacatttccgtgtcgcccttattcccttttttgcggcattttgccttcctgtttttgctcacccagaaacgctggtgaaagtaaaagatgctgaagatcagttgggtgcacgagtgggttacatcgaactggatctcaacagcggtaagatccttgagagttttcgccccgaagaacgttttccaatgatgagcacttttaaagttctgctatgtggcgcggtattatcccgtattgacgccgggcaagagcaactcggtcgccgcatacactattctcagaatgacttggttgagtactcaccagtcacagaaaagcatcttacggatggcatgacagtaagagaattatgcagtgctgccataaccatgagtgataacactgcggccaacttacttctgacaacgatcggaggaccgaaggagctaaccgcttttttgcacaacatgggggatcatgtaactcgccttgatcgttgggaaccggagctgaatgaagccataccaaacgacgagcgtgacaccacgatgcctgtagcaatggcaacaacgttgcgcaaactattaactggcgaactacttactctagcttcccggcaacaattaatagactggatggaggcggataaagttgcaggaccacttctgcgctcggcccttccggctggctggtttattgctgataaatctggagccggtgagcgtgggtctcgcggtatcattgcagcactggggccagatggtaagccctcccgtatcgtagttatctacacgacggggagtcaggcaactatggatgaacgaaatagacagatcgctgagataggtgcctcactgattaagcattggtaactgtcagaccaagtttactcatatatactttagattgatttaaaacttcatttttaatttaaaaggatctaggtgaagatcctttttgataatctcatgaccaaaatcccttaacgtgagttttcgttccactgagcgtcagaccccgtagaaaagatcaaaggatcttcttgagatcctttttttctgcgcgtaatctgctgcttgcaaacaaaaaaaccaccgctaccagcggtggtttgtttgccggatcaagagctaccaactctttttccgaaggtaactggcttcagcagagcgcagataccaaatactgtccttctagtgtagccgtagttaggccaccacttcaagaactctgtagcaccgcctacatacctcgctctgctaatcctgttaccagtggctgctgccagtggcgataagtcgtgtcttaccgggttggactcaagacgatagttaccggataaggcgcagcggtcgggctgaacggggggttcgtgcacacagcccagcttggagcgaacgacctacaccgaactgagatacctacagcgtgagctatgagaaagcgccacgcttcccgaagggagaaaggcggacaggtatccggtaagcggcagggtcggaacaggagagcgcacgagggagcttccagggggaaacgcctggtatctttatagtcctgtcgggtttcgccacctctgacttgagcgtcgatttttgtgatgctcgtcaggggggcggagcctatggaaaaacgccagcaacgcggcctttttacggttcctggccttttgctggccttttgctcacatgttctttcctgcgttatcccctgattctgtggataaccgtattaccgcctttgagtgagctgataccgctcgccgcagccgaacgaccgagcgcagcgagtcagtgagcgaggaagcggaagagcgcccaatacgcaaaccgcctctccccgcgcgttggccgattcattaatgcagctggcacgacaggtttcccgactggaaagcgggcagtgagcgcaacgcaattaatgtgagttagctcactcattaggcaccccaggctttacactttatgcttccggctcgtatgttgtgtggaattgtgagcggataacaatttcacacaggaaacagcatatgcaaacaagcattactctgacatccaacgcatccggtacgtttgacggttactattacgaactctggaaggatactggcaatacaacaatgacggtctacactcaaggtcgcttttcctgccagtggtcgaacatcaataacgcgttgtttaggaccgggaagaaatacaaccagaattggcagtctcttggcacaatccggatcacgtactctgcgacttacaacccaaacgggaactcctacttgtgtatctatggctggtctaccaacccattggtcgagttctacatcgttgagtcctgggggaactggagaccgcctggtgccacgtccctgggccaagtgacaatcgatggcgggacctacgacatctataggacgacacgcgtcaaccagccttgccatccaaaggggacaaaggtcgtggtcaagggcaagggcatcgtgaatattgaggacgttaaggaggggaattacgttctcggcatcgacggctggcagaaggttaagaaggtctggaagtacgagtacgagggcgagctcattaacgttaatgggctgaagtgcacaccgaaccacaagatccccctccgctacaagattaagcataagaagatcaacaagaacgattacctggtgagggacatctacgcgaagtcgctcctgaccaagttcaagggcgaggggaagctcatcctgtgcaaggacttcgagacgattggcaactacgagaagtacatcaatgacatggatgaggacttcatcctcaagtccgagctgatcggcattctcctggctgaggggcacctcctgaggagggatatcgagtacttcgactccagccggggcaagaagcgcattagccatcagtaccgcgtggagatcacggtcaacgaggatgagaaggacttcatcgagaagattaagtacatcttcaagaagctcttcaactacgagctctacgtgcgccgcaagaagggcaccaaggccattacgctcgggtgcgcgaagaaggatatctacctcaagattgaggagatcctgaagaacaaggagaagtacctcccgaatgccatcctgcgggggttcttcgagggcgacggctacgtgaacacagttaggcgggctgtggtcgttaatcagggcactaacaattacgataagattaagttcatcgccagcctcctggacaggctcggcatcaagtacagcttctacacatactcgtacgaggagagggggaagaagctgaagcgctacgtgatcgagattttctctaagggcgacctcattaagttctcaatcctgatttcgttcatctctcgcaggaagaacaatctcctgaacgagatcattaggcagaagactctgtacaagatcggcgattacgggttctacgacctcgacgatgtgtgcgtctcactggagtcctacaagggcgaggtgtacgatctcactctggagggcaggccttactacttcgccaatggcatcctcactcataattccattgtggggacagccacgttcgatcagtactggagcgtgcgcacctctaagcggacttcaggaacagtgaccgtgaccgatcacttccgcgcctgggcgaaccggggcctgaacctcggcacaatagaccaaattacattgtgcgtggagggttaccaaagctctggatcagccaacatcacccagaacaccttctctcagggctcttcttccggcagttcgggtggctcatccggctccacaacgactactcgcatcgagtgtgagaacatgtccttgtccggaccctacgttagcaggatcaccaatccctttaatggtattgcgctgtacgccaacggagacacagcccgcgctaccgttaacttccccgcaagtcgcaactacaatttccgcctgcggggttgcggcaacaacaataatcttgcccgtgtggacctgaggatcgacggacggaccgtcgggaccttttattaccagggcacatacccctgggaggccccaattgacaatgtttatgtcagtgcggggagtcatacagtcgaaatcactgttactgcggataacggcacatgggacgtgtatgccgactacctggtgatacagtgactcgagggggggcccggtacccaattcgccctatagtgagtcgtattacaattcactggccgtcgttttacaacgtcgtgactgggaaaaccctggcgttacccaacttaatcgccttgcagcacatccccctttcgccagctggcgtaatagcgaagaggcccgcaccgatcgcccttcccaacagttgcgcagcctgaatggcgaatggaaattgtaagcgttaatattttgttaaaattcgcgttaaatttttgttaaatcagctcattttttaaccaataggccgaaatcggcaaaatcccttataaatcaaaagaatagaccgagatagggttgagtgttgttccagtttggaacaagagtccactattaaagaacgtggactccaacgtcaaagggcgaaaaaccgtctatcagggcgatggcccactacgtgaaccatcaccctaatcaagttttttggggtcgaggtgccgtaaagcactaaatcggaaccctaaagggagcccccgatttagagcttgacggggaaagccggcgaacgtggcgagaaaggaagggaagaaagcgaaaggagcgggcgctagggcgctggcaagtgtagcggtcacgctgcgcgtaaccaccacacccgccgcgcttaatgcgccgctacagggcgcgtcaggtg

SEQ ID NO: 3051 - DNA, 5258 bp, Artificial Sequence
  Synthetic Construct, AS-51 intein modified protein encoding nucleic acids in pBluescript
gcacttttcggggaaatgtgcgcggaacccctatttgtttatttttctaaatacattcaaatatgtatccgctcatgagacaataaccctgataaatgcttcaataatattgaaaaaggaagagtatgagtattcaacatttccgtgtcgcccttattcccttttttgcggcattttgccttcctgtttttgctcacccagaaacgctggtgaaagtaaaagatgctgaagatcagttgggtgcacgagtgggttacatcgaactggatctcaacagcggtaagatccttgagagttttcgccccgaagaacgttttccaatgatgagcacttttaaagttctgctatgtggcgcggtattatcccgtattgacgccgggcaagagcaactcggtcgccgcatacactattctcagaatgacttggttgagtactcaccagtcacagaaaagcatcttacggatggcatgacagtaagagaattatgcagtgctgccataaccatgagtgataacactgcggccaacttacttctgacaacgatcggaggaccgaaggagctaaccgcttttttgcacaacatgggggatcatgtaactcgccttgatcgttgggaaccggagctgaatgaagccataccaaacgacgagcgtgacaccacgatgcctgtagcaatggcaacaacgttgcgcaaactattaactggcgaactacttactctagcttcccggcaacaattaatagactggatggaggcggataaagttgcaggaccacttctgcgctcggcccttccggctggctggtttattgctgataaatctggagccggtgagcgtgggtctcgcggtatcattgcagcactggggccagatggtaagccctcccgtatcgtagttatctacacgacggggagtcaggcaactatggatgaacgaaatagacagatcgctgagataggtgcctcactgattaagcattggtaactgtcagaccaagtttactcatatatactttagattgatttaaaacttcatttttaatttaaaaggatctaggtgaagatcctttttgataatctcatgaccaaaatcccttaacgtgagttttcgttccactgagcgtcagaccccgtagaaaagatcaaaggatcttcttgagatcctttttttctgcgcgtaatctgctgcttgcaaacaaaaaaaccaccgctaccagcggtggtttgtttgccggatcaagagctaccaactctttttccgaaggtaactggcttcagcagagcgcagataccaaatactgtccttctagtgtagccgtagttaggccaccacttcaagaactctgtagcaccgcctacatacctcgctctgctaatcctgttaccagtggctgctgccagtggcgataagtcgtgtcttaccgggttggactcaagacgatagttaccggataaggcgcagcggtcgggctgaacggggggttcgtgcacacagcccagcttggagcgaacgacctacaccgaactgagatacctacagcgtgagctatgagaaagcgccacgcttcccgaagggagaaaggcggacaggtatccggtaagcggcagggtcggaacaggagagcgcacgagggagcttccagggggaaacgcctggtatctttatagtcctgtcgggtttcgccacctctgacttgagcgtcgatttttgtgatgctcgtcaggggggcggagcctatggaaaaacgccagcaacgcggcctttttacggttcctggccttttgctggccttttgctcacatgttctttcctgcgttatcccctgattctgtggataaccgtattaccgcctttgagtgagctgataccgctcgccgcagccgaacgaccgagcgcagcgagtcagtgagcgaggaagcggaagagcgcccaatacgcaaaccgcctctccccgcgcgttggccgattcattaatgcagctggcacgacaggtttcccgactggaaagcgggcagtgagcgcaacgcaattaatgtgagttagctcactcattaggcaccccaggctttacactttatgcttccggctcgtatgttgtgtggaattgtgagcggataacaatttcacacaggaaacagcatatgcaaacaagcattactctgacatccaacgcatccggtacgtttgacggttactattacgaactctggaaggatactggcaatacaacaatgacggtctacactcaaggtcgcttttcctgccagtggtcgaacatcaataacgcgttgtttaggaccgggaagaaatacaaccagaattggcagtctcttggcacaatccggatcacgtactctgcgacttacaacccaaacgggaactcctacttgtgtatctatggctggtctaccaacccattggtcgagttctacatcgttgagtcctgggggaactggagaccgcctggtgccacgtccctgggccaagtgacaatcgatggcgggacctacgacatctataggacgacacgcgtcaaccagcctagcattctccctgacgagtacctgactattattgaggaggatggcattaaggtcgtgaagatcggggagtacattgatgatctcatgcgcaagcacaaggacaagatcaagttctcgggcatctctgagattctggagacaaagaacctcaagactttctccttcgataagatcacgaagaagtgcgagattaagaaggtgaaggcgctgatcaggcacccatacttcggcaaggcttacaagatcaagctccggtctggccgcaccattaaggtcacgagggggcattcactgttcaagtacgagaacgggaagatcgtcgaggttaagggcgacgatgtgcggttcggggacctgatcgtggtcccaaagaagctcacctgcgtcgataaggaggttgtgatcaacattcctaagcggctgatcaatgctgacgaggaggagatcaaggatctcgtcattaccaagcacaaggacaaggccttcttcgttaagctcaagaagacgctggaggatatcgagaacaataagctcaaggtcatcttcgacgattgcattctctacctgaaggagctcggcctgatcgactacaacatcattaagaagattaataaggttgacatcaagattctggatgaggagaagttcaaggcctacaagaagtacttcgacaccgtcatcgagcatggcaacttcaagaaggggcgctgcaatattcagtacatcaagattaaggactacatcgcgaacattcccgacaaggagttcgaggattgcgagatcggcgcctactcggggaagattaatgcgctcctgaagctcgacgagaagctggctaagttcctcggcttcttcgtgacacgcgggaggctgaagaagcagaagctcaagggcgagactgtctacgagatctcagtttacaagtccctcccggagtaccagaaggagatcgctgagacattcaaggaggtcttcggcgccgggtccatggttaaggacaaagtgactatggataacaagatcgtgtacctcgtcctgaagtacattttcaagtgcggcgacaaggataagaagcacatccccgaggagctcttcctggcctccgagagcgtgatcaagagcttcctggacggcttcctcaaggccaagaagaacagccataaggggacctcgacgttcatggcgaaggatgagaagtacctcaaccagctgatgatcctcttcaatctggttggcattccgacaaggttcactcccgtgaagaacaagggctacaagctcaccctgaatccgaagtacgggacggtgaaggacctcatgctggatgaggtcaaggagatcgaggcgttcgagtacagcggctacgtctacgatctctctgtggaggataatgagaacttcctcgtcaacaacatctacgctcataattccattgtggggacagccacgttcgatcagtactggagcgtgcgcacctctaagcggacttcaggaacagtgaccgtgaccgatcacttccgcgcctgggcgaaccggggcctgaacctcggcacaatagaccaaattacattgtgcgtggagggttaccaaagctctggatcagccaacatcacccagaacaccttctctcagggctcttcttccggcagttcgggtggctcatccggctccacaacgactactcgcatcgagtgtgagaacatgtccttgtccggaccctacgttagcaggatcaccaatccctttaatggtattgcgctgtacgccaacggagacacagcccgcgctaccgttaacttccccgcaagtcgcaactacaatttccgcctgcggggttgcggcaacaacaataatcttgcccgtgtggacctgaggatcgacggacggaccgtcgggaccttttattaccagggcacatacccctgggaggccccaattgacaatgtttatgtcagtgcggggagtcatacagtcgaaatcactgttactgcggataacggcacatgggacgtgtatgccgactacctggtgatacagtgactcgagggggggcccggtacccaattcgccctatagtgagtcgtattacaattcactggccgtcgttttacaacgtcgtgactgggaaaaccctggcgttacccaacttaatcgccttgcagcacatccccctttcgccagctggcgtaatagcgaagaggcccgcaccgatcgcccttcccaacagttgcgcagcctgaatggcgaatggaaattgtaagcgttaatattttgttaaaattcgcgttaaatttttgttaaatcagctcattttttaaccaataggccgaaatcggcaaaatcccttataaatcaaaagaatagaccgagatagggttgagtgttgttccagtttggaacaagagtccactattaaagaacgtggactccaacgtcaaagggcgaaaaaccgtctatcagggcgatggcccactacgtgaaccatcaccctaatcaagttttttggggtcgaggtgccgtaaagcactaaatcggaaccctaaagggagcccccgatttagagcttgacggggaaagccggcgaacgtggcgagaaaggaagggaagaaagcgaaaggagcgggcgctagggcgctggcaagtgtagcggtcacgctgcgcgtaaccaccacacccgccgcgcttaatgcgccgctacagggcgcgtcaggtg

SEQ ID NO: 3052 - DNA, 5474 bp, Artificial Sequence
  Synthetic Construct, AS-52 intein modified protein encoding nucleic acids in pBluescript
gcacttttcggggaaatgtgcgcggaacccctatttgtttatttttctaaatacattcaaatatgtatccgctcatgagacaataaccctgataaatgcttcaataatattgaaaaaggaagagtatgagtattcaacatttccgtgtcgcccttattcccttttttgcggcattttgccttcctgtttttgctcacccagaaacgctggtgaaagtaaaagatgctgaagatcagttgggtgcacgagtgggttacatcgaactggatctcaacagcggtaagatccttgagagttttcgccccgaagaacgttttccaatgatgagcacttttaaagttctgctatgtggcgcggtattatcccgtattgacgccgggcaagagcaactcggtcgccgcatacactattctcagaatgacttggttgagtactcaccagtcacagaaaagcatcttacggatggcatgacagtaagagaattatgcagtgctgccataaccatgagtgataacactgcggccaacttacttctgacaacgatcggaggaccgaaggagctaaccgcttttttgcacaacatgggggatcatgtaactcgccttgatcgttgggaaccggagctgaatgaagccataccaaacgacgagcgtgacaccacgatgcctgtagcaatggcaacaacgttgcgcaaactattaactggcgaactacttactctagcttcccggcaacaattaatagactggatggaggcggataaagttgcaggaccacttctgcgctcggcccttccggctggctggtttattgctgataaatctggagccggtgagcgtgggtctcgcggtatcattgcagcactggggccagatggtaagccctcccgtatcgtagttatctacacgacggggagtcaggcaactatggatgaacgaaatagacagatcgctgagataggtgcctcactgattaagcattggtaactgtcagaccaagtttactcatatatactttagattgatttaaaacttcatttttaatttaaaaggatctaggtgaagatcctttttgataatctcatgaccaaaatcccttaacgtgagttttcgttccactgagcgtcagaccccgtagaaaagatcaaaggatcttcttgagatcctttttttctgcgcgtaatctgctgcttgcaaacaaaaaaaccaccgctaccagcggtggtttgtttgccggatcaagagctaccaactctttttccgaaggtaactggcttcagcagagcgcagataccaaatactgtccttctagtgtagccgtagttaggccaccacttcaagaactctgtagcaccgcctacatacctcgctctgctaatcctgttaccagtggctgctgccagtggcgataagtcgtgtcttaccgggttggactcaagacgatagttaccggataaggcgcagcggtcgggctgaacggggggttcgtgcacacagcccagcttggagcgaacgacctacaccgaactgagatacctacagcgtgagctatgagaaagcgccacgcttcccgaagggagaaaggcggacaggtatccggtaagcggcagggtcggaacaggagagcgcacgagggagcttccagggggaaacgcctggtatctttatagtcctgtcgggtttcgccacctctgacttgagcgtcgatttttgtgatgctcgtcaggggggcggagcctatggaaaaacgccagcaacgcggcctttttacggttcctggccttttgctggccttttgctcacatgttctttcctgcgttatcccctgattctgtggataaccgtattaccgcctttgagtgagctgataccgctcgccgcagccgaacgaccgagcgcagcgagtcagtgagcgaggaagcggaagagcgcccaatacgcaaaccgcctctccccgcgcgttggccgattcattaatgcagctggcacgacaggtttcccgactggaaagcgggcagtgagcgcaacgcaattaatgtgagttagctcactcattaggcaccccaggctttacactttatgcttccggctcgtatgttgtgtggaattgtgagcggataacaatttcacacaggaaacagcatatgcaaacaagcattactctgacatccaacgcatccggtacgtttgacggttactattacgaactctggaaggatactggcaatacaacaatgacggtctacactcaaggtcgcttttcctgccagtggtcgaacatcaataacgcgttgtttaggaccgggaagaaatacaaccagaattggcagtctcttggcacaatccggatcacgtactctgcgacttacaacccaaacgggaactcctacttgtgtatctatggctggtctaccaacccattggtcgagttctacatcgttgagtcctgggggaactggagaccgcctggtgccacgtccctgggccaagtgacaatcgatggcgggacctacgacatctataggacgacacgcgtcaaccagccttgcctgacgggggacactaaggtcatcgtgaatggggagattcgggagatcggggaggttattgaggagatttctaacgggaagttcggcgtgacactcactaacaatctcaaggtcctgggcatcgacgaggatgggaagattcgcgagttcgacgtgcagtatgtgtacaaggataagaccaacacgctcatcaagattaagacaaagatgggcagggagctgaaggttaccacgtaccacccgctcctgatcaatcataagaacggcgagattaagtgggagaaggcggagaacctcaaggtcggggacaagctggctacgccccgctacatcctcttcaatgagagcgattacaacgaggagctcgctgagtggctgggctacttcatcggcgacgggcacgccgataaggagtcgaataagatcacattcactaacggggacgagaagctgcggaagcgcttcgccgagctcaccgagaagctgttcaaggatgcgaagatcaaggagcgcattcataaggacaggacgccagatatctacgtcaactccaaggaggcggttgagttcatcgacaagctcggcctgagggggaagaaggctgataaggtgcggatccctaaggagattatgcgctcagacgctctcagggcgttcctgagggcttacttcgactgcgatggcgggatcgagaagcactccattgttctcagcaccgcttcgaaggagatggccgaggacctggtgtacgctctcctgaggttcggcatcattgccaagctgcgggagaaggtcaacaagaacaataacaaggtttactaccatatcgtgatttccaactcctccaacctccgcaccttcctggacaacatcggcttctctcaggagaggaagctcaagaagctcctggagatcattaaggatgagaatccgaacctggacgtgatcacgattgataaggagaagatccggtacattagggaccggctcaaggtcaagctgacacgcgacatcgagaaggataattggtcctacaacaagtgcaggaagatcactcaggagctcctgaaggagatctactaccggctggaggagctgaaggagatcgagaaggccctggaggagaacatcctgattgactgggatgaggtggccgagcgcaggaaggagatcgcggagaagacaggcattcgctccgaccgcatcctggagtacattcgggggaagcgcaagccaagcctcaagaactacatcaagattgccaatactctgggcaagaacatcgagaagatcattgacgcgatgcggatcttcgctaagaagtactcgtcttacgcggagatcggcaagatgctgaatatgtggaactcatccatcaagatctacctggagtctaatacccaggagatcgagaagctggaggagattaggaagacggagctcaagctggtcaaggagatcctcaacgacgagaagctgatcgattctattggctacgtcctcttcctggcgtcaaatgagatctactgggacgagatcgttgagattgagcagctcaacggggagttcaccatctacgatctgcatgttccacgctaccacaacttcattgggggcaacctgcctactattctccacaactccattgtggggacagccacgttcgatcagtactggagcgtgcgcacctctaagcggacttcaggaacagtgaccgtgaccgatcacttccgcgcctgggcgaaccggggcctgaacctcggcacaatagaccaaattacattgtgcgtggagggttaccaaagctctggatcagccaacatcacccagaacaccttctctcagggctcttcttccggcagttcgggtggctcatccggctccacaacgactactcgcatcgagtgtgagaacatgtccttgtccggaccctacgttagcaggatcaccaatccctttaatggtattgcgctgtacgccaacggagacacagcccgcgctaccgttaacttccccgcaagtcgcaactacaatttccgcctgcggggttgcggcaacaacaataatcttgcccgtgtggacctgaggatcgacggacggaccgtcgggaccttttattaccagggcacatacccctgggaggccccaattgacaatgtttatgtcagtgcggggagtcatacagtcgaaatcactgttactgcggataacggcacatgggacgtgtatgccgactacctggtgatacagtgactcgagggggggcccggtacccaattcgccctatagtgagtcgtattacaattcactggccgtcgttttacaacgtcgtgactgggaaaaccctggcgttacccaacttaatcgccttgcagcacatccccctttcgccagctggcgtaatagcgaagaggcccgcaccgatcgcccttcccaacagttgcgcagcctgaatggcgaatggaaattgtaagcgttaatattttgttaaaattcgcgttaaatttttgttaaatcagctcattttttaaccaataggccgaaatcggcaaaatcccttataaatcaaaagaatagaccgagatagggttgagtgttgttccagtttggaacaagagtccactattaaagaacgtggactccaacgtcaaagggcgaaaaaccgtctatcagggcgatggcccactacgtgaaccatcaccctaatcaagttttttggggtcgaggtgccgtaaagcactaaatcggaaccctaaagggagcccccgatttagagcttgacggggaaagccggcgaacgtggcgagaaaggaagggaagaaagcgaaaggagcgggcgctagggcgctggcaagtgtagcggtcacgctgcgcgtaaccaccacacccgccgcgcttaatgcgccgctacagggcgcgtcaggtg

SEQ ID NO: 3053 - DNA, 5138 bp, Artificial Sequence
  Synthetic Construct, AS-53 intein modified protein encoding nucleic acids in pBluescript
gcacttttcggggaaatgtgcgcggaacccctatttgtttatttttctaaatacattcaaatatgtatccgctcatgagacaataaccctgataaatgcttcaataatattgaaaaaggaagagtatgagtattcaacatttccgtgtcgcccttattcccttttttgcggcattttgccttcctgtttttgctcacccagaaacgctggtgaaagtaaaagatgctgaagatcagttgggtgcacgagtgggttacatcgaactggatctcaacagcggtaagatccttgagagttttcgccccgaagaacgttttccaatgatgagcacttttaaagttctgctatgtggcgcggtattatcccgtattgacgccgggcaagagcaactcggtcgccgcatacactattctcagaatgacttggttgagtactcaccagtcacagaaaagcatcttacggatggcatgacagtaagagaattatgcagtgctgccataaccatgagtgataacactgcggccaacttacttctgacaacgatcggaggaccgaaggagctaaccgcttttttgcacaacatgggggatcatgtaactcgccttgatcgttgggaaccggagctgaatgaagccataccaaacgacgagcgtgacaccacgatgcctgtagcaatggcaacaacgttgcgcaaactattaactggcgaactacttactctagcttcccggcaacaattaatagactggatggaggcggataaagttgcaggaccacttctgcgctcggcccttccggctggctggtttattgctgataaatctggagccggtgagcgtgggtctcgcggtatcattgcagcactggggccagatggtaagccctcccgtatcgtagttatctacacgacggggagtcaggcaactatggatgaacgaaatagacagatcgctgagataggtgcctcactgattaagcattggtaactgtcagaccaagtttactcatatatactttagattgatttaaaacttcatttttaatttaaaaggatctaggtgaagatcctttttgataatctcatgaccaaaatcccttaacgtgagttttcgttccactgagcgtcagaccccgtagaaaagatcaaaggatcttcttgagatcctttttttctgcgcgtaatctgctgcttgcaaacaaaaaaaccaccgctaccagcggtggtttgtttgccggatcaagagctaccaactctttttccgaaggtaactggcttcagcagagcgcagataccaaatactgtccttctagtgtagccgtagttaggccaccacttcaagaactctgtagcaccgcctacatacctcgctctgctaatcctgttaccagtggctgctgccagtggcgataagtcgtgtcttaccgggttggactcaagacgatagttaccggataaggcgcagcggtcgggctgaacggggggttcgtgcacacagcccagcttggagcgaacgacctacaccgaactgagatacctacagcgtgagctatgagaaagcgccacgcttcccgaagggagaaaggcggacaggtatccggtaagcggcagggtcggaacaggagagcgcacgagggagcttccagggggaaacgcctggtatctttatagtcctgtcgggtttcgccacctctgacttgagcgtcgatttttgtgatgctcgtcaggggggcggagcctatggaaaaacgccagcaacgcggcctttttacggttcctggccttttgctggccttttgctcacatgttctttcctgcgttatcccctgattctgtggataaccgtattaccgcctttgagtgagctgataccgctcgccgcagccgaacgaccgagcgcagcgagtcagtgagcgaggaagcggaagagcgcccaatacgcaaaccgcctctccccgcgcgttggccgattcattaatgcagctggcacgacaggtttcccgactggaaagcgggcagtgagcgcaacgcaattaatgtgagttagctcactcattaggcaccccaggctttacactttatgcttccggctcgtatgttgtgtggaattgtgagcggataacaatttcacacaggaaacagcatatgcaaacaagcattactctgacatccaacgcatccggtacgtttgacggttactattacgaactctggaaggatactggcaatacaacaatgacggtctacactcaaggtcgcttttcctgccagtggtcgaacatcaataacgcgttgtttaggaccgggaagaaatacaaccagaattggcagtctcttggcacaatccggatcacgtactctgcgacttacaacccaaacgggaactcctacttgtgtatctatggctggtctaccaacccattggtcgagttctacatcgttgagtcctgggggaactggagaccgcctggtgccacgtccctgggccaagtgacaatcgatggcgggacctacgacatctataggacgacacgcgtcaaccagccttcggtctctaaggacacacctattctcgtgaagattgatggcaaggttaagcgcactactttcgaggagctggacaagatctacttcgagaccaacgacgagaatgagatgtacaagaaggtggacaacctggaggtgctgacagtcgatgagaatttccgggttcgctggaggaaggtgtcgactatcattaggcacaaggtcgacaagatcctccggattaagttcgagggcgggtacattgagctgacgggcaaccattccatcatgatgctcgatgagaatgggctggtggccaagaaggcgagcgacatcaaggtcggcgattgcttcctctcgttcgtcgcgaacatcgagggcgagaaggaccggctcgatctgaaggagttcgagccaaaggacatcacctcccgcgtcaagatcattaacgacttcgatatcgacgaggatacggcttggatgctcggcctctacgtggctgagggcgctgttgggttcaagggcaagacctcaggccaggttatctacacgctcgggtcccacgagcatgacctcatcaacaagctgaatgacattgtggataagaagggcttcagcaagtacgagaatttcacaggctcggggttcgaccggaagcgcctgtctgcgaagcagatccgcattctcaacactcagctggctaggttcgtggaggagaacttctacgacggcaatgggcgcagggctaggaacaagcggatcccggatatcattttcgagctcaaggagaatctgagggtcgagttcctcaaggggctggctgacggcgattccagcgggaactggcgcgaggtggtcaggatttcgtctaagtctgacaatctcctgatcgatacagtgtggctcgccaggatctcaggcattgagtcatccattttcgagaacgaggcgcggctgatctggaagggcgggatgaagtggaagaagtctaatctcctgccggccgagcccatcattaagatgatcaagaagctggagaacaagattaacggcaattggcggtacatcctccgccaccagctgtacgagggcaagaagcgcgtctccaaggacaagatcaagcagattctggagatggtcaacgttgagaagctgtccgacaaggagaaggaggtttacgatctcctgaagaagctgagcaagaccgagctctacgcgctggttgtgaaggagatcgagatcattgactacaacgatttcgtctacgacgtctctgttccaaacaatgagatgttcttcgctggcaatgttccaattctgctccacaactccattgtggggacagccacgttcgatcagtactggagcgtgcgcacctctaagcggacttcaggaacagtgaccgtgaccgatcacttccgcgcctgggcgaaccggggcctgaacctcggcacaatagaccaaattacattgtgcgtggagggttaccaaagctctggatcagccaacatcacccagaacaccttctctcagggctcttcttccggcagttcgggtggctcatccggctccacaacgactactcgcatcgagtgtgagaacatgtccttgtccggaccctacgttagcaggatcaccaatccctttaatggtattgcgctgtacgccaacggagacacagcccgcgctaccgttaacttccccgcaagtcgcaactacaatttccgcctgcggggttgcggcaacaacaataatcttgcccgtgtggacctgaggatcgacggacggaccgtcgggaccttttattaccagggcacatacccctgggaggccccaattgacaatgtttatgtcagtgcggggagtcatacagtcgaaatcactgttactgcggataacggcacatgggacgtgtatgccgactacctggtgatacagtgactcgagggggggcccggtacccaattcgccctatagtgagtcgtattacaattcactggccgtcgttttacaacgtcgtgactgggaaaaccctggcgttacccaacttaatcgccttgcagcacatccccctttcgccagctggcgtaatagcgaagaggcccgcaccgatcgcccttcccaacagttgcgcagcctgaatggcgaatggaaattgtaagcgttaatattttgttaaaattcgcgttaaatttttgttaaatcagctcattttttaaccaataggccgaaatcggcaaaatcccttataaatcaaaagaatagaccgagatagggttgagtgttgttccagtttggaacaagagtccactattaaagaacgtggactccaacgtcaaagggcgaaaaaccgtctatcagggcgatggcccactacgtgaaccatcaccctaatcaagttttttggggtcgaggtgccgtaaagcactaaatcggaaccctaaagggagcccccgatttagagcttgacggggaaagccggcgaacgtggcgagaaaggaagggaagaaagcgaaaggagcgggcgctagggcgctggcaagtgtagcggtcacgctgcgcgtaaccaccacacccgccgcgcttaatgcgccgctacagggcgcgtcaggtg

SEQ ID NO: 3054 - DNA, 5459 bp, Artificial Sequence
  Synthetic Construct, AS-54 intein modified protein encoding nucleic acids in pBluescript
gcacttttcggggaaatgtgcgcggaacccctatttgtttatttttctaaatacattcaaatatgtatccgctcatgagacaataaccctgataaatgcttcaataatattgaaaaaggaagagtatgagtattcaacatttccgtgtcgcccttattcccttttttgcggcattttgccttcctgtttttgctcacccagaaacgctggtgaaagtaaaagatgctgaagatcagttgggtgcacgagtgggttacatcgaactggatctcaacagcggtaagatccttgagagttttcgccccgaagaacgttttccaatgatgagcacttttaaagttctgctatgtggcgcggtattatcccgtattgacgccgggcaagagcaactcggtcgccgcatacactattctcagaatgacttggttgagtactcaccagtcacagaaaagcatcttacggatggcatgacagtaagagaattatgcagtgctgccataaccatgagtgataacactgcggccaacttacttctgacaacgatcggaggaccgaaggagctaaccgcttttttgcacaacatgggggatcatgtaactcgccttgatcgttgggaaccggagctgaatgaagccataccaaacgacgagcgtgacaccacgatgcctgtagcaatggcaacaacgttgcgcaaactattaactggcgaactacttactctagcttcccggcaacaattaatagactggatggaggcggataaagttgcaggaccacttctgcgctcggcccttccggctggctggtttattgctgataaatctggagccggtgagcgtgggtctcgcggtatcattgcagcactggggccagatggtaagccctcccgtatcgtagttatctacacgacggggagtcaggcaactatggatgaacgaaatagacagatcgctgagataggtgcctcactgattaagcattggtaactgtcagaccaagtttactcatatatactttagattgatttaaaacttcatttttaatttaaaaggatctaggtgaagatcctttttgataatctcatgaccaaaatcccttaacgtgagttttcgttccactgagcgtcagaccccgtagaaaagatcaaaggatcttcttgagatcctttttttctgcgcgtaatctgctgcttgcaaacaaaaaaaccaccgctaccagcggtggtttgtttgccggatcaagagctaccaactctttttccgaaggtaactggcttcagcagagcgcagataccaaatactgtccttctagtgtagccgtagttaggccaccacttcaagaactctgtagcaccgcctacatacctcgctctgctaatcctgttaccagtggctgctgccagtggcgataagtcgtgtcttaccgggttggactcaagacgatagttaccggataaggcgcagcggtcgggctgaacggggggttcgtgcacacagcccagcttggagcgaacgacctacaccgaactgagatacctacagcgtgagctatgagaaagcgccacgcttcccgaagggagaaaggcggacaggtatccggtaagcggcagggtcggaacaggagagcgcacgagggagcttccagggggaaacgcctggtatctttatagtcctgtcgggtttcgccacctctgacttgagcgtcgatttttgtgatgctcgtcaggggggcggagcctatggaaaaacgccagcaacgcggcctttttacggttcctggccttttgctggccttttgctcacatgttctttcctgcgttatcccctgattctgtggataaccgtattaccgcctttgagtgagctgataccgctcgccgcagccgaacgaccgagcgcagcgagtcagtgagcgaggaagcggaagagcgcccaatacgcaaaccgcctctccccgcgcgttggccgattcattaatgcagctggcacgacaggtttcccgactggaaagcgggcagtgagcgcaacgcaattaatgtgagttagctcactcattaggcaccccaggctttacactttatgcttccggctcgtatgttgtgtggaattgtgagcggataacaatttcacacaggaaacagcatatgcaaacaagcattactctgacatccaacgcatccggtacgtttgacggttactattacgaactctggaaggatactggcaatacaacaatgacggtctacactcaaggtcgcttttcctgccagtggtcgaacatcaataacgcgttgtttaggaccgggaagaaatacaaccagaattggcagtctcttggcacaatccggatcacgtactctgcgacttacaacccaaacgggaactcctacttgtgtatctatggctggtctaccaacccattggtcgagttctacatcgttgagtcctgggggaactggagaccgcctggtgccacgtccctgggccaagtgacaatcgatggcgggacctacgacatctataggacgacacgcgtcaaccagccttgcctgacgggggacgctaagattactctgcctgacgagcgggagatcaagattgaggatttcattaagatgttcgaggagcgcaagctgaagcacgtcctcaacaggaatggggaggacctggtgctcgctggcgtcaagttcaactccaagatcgttaatcacaaggtgtacaggctggtcctggagagcgggagggagatcgaggctaccggcgaccataagttcctgacgagggatggctggaaggaggtgtacgagctcaaggaggacgatgaggttctggtgtacccggctctggagggcgttgggttcgaggtggacgagcgcaggatcattggcctgaacgagttctacgagttcctcacaaattacgagatcaagctggggtacaagccactcggcaaggcgaagtcatacaaggagctgattactcgcgacaaggagaagatcctctctagggtcctggagctctccgataagtactccaagagcgagatccggcgcaagattgaggaggagttcggcatcaagatttctctgaccacgatcaagaacctcattaatgggaagatcgacggcttcgccctgaagtatgtgcgcaagatcaaggagctcggctgggatgagatcacctacgacgatgagaaggctgggatcttcgccaggctcctgggcttcatcattggcgacgggcacctgtcgaagtctaaggagggccggatcctgattacagctactattaacgagctggaggggatcaagaaggatctggagaagctcggcatcaaggcctcgaacatcattgagaaggacattgagcataagctcgatgggagggagatcaagggcaagacctctttcatctacattaacaataaggccttctacctcctgctcaacttctggggggtcgagattggcaataagacgatcaacgggtacaatattccaaagtggatcaagtacggcaacaagttcgttaagagggagttcctgaggggcctcttcggggctgacggcacaaagccttacatcaagaagtacaacatcaatgggattaagctgggcattcgggtggagaacatctccaaggataagactctggagttcttcgaggaggtcaagaagatgctggaggagttcgaggtcgagagctacattaaggtttcgaagatcgacaacaagaatctgaccgagctcatcgtcaaggccaacaataagaactacctgaagtacctctcaaggatctcctacgcgtacgagaaggacaatttcgctaggctggtgggcgagtacctccggatcaaggaggcgtacaaggacatcattctgaaggagatcgccgagaacgcgctcaaggaggccgatggcgagaagagcctgagggagctcgctaggaagtacaacgtcccggttgacttcatcattaatcagctgaaggggaaggatatcggcctcccccgcaacttcatgacgttcgaggagttcctcaaggagaaggtggtcgacggcaagtatgtgtccgagcggatcattaagaaggagtgcatcggctaccgcgatgtgtacgacattacttgccacaaggatccttctttcattgctaacggcttcgtctctcataactccattgtggggacagccacgttcgatcagtactggagcgtgcgcacctctaagcggacttcaggaacagtgaccgtgaccgatcacttccgcgcctgggcgaaccggggcctgaacctcggcacaatagaccaaattacattgtgcgtggagggttaccaaagctctggatcagccaacatcacccagaacaccttctctcagggctcttcttccggcagttcgggtggctcatccggctccacaacgactactcgcatcgagtgtgagaacatgtccttgtccggaccctacgttagcaggatcaccaatccctttaatggtattgcgctgtacgccaacggagacacagcccgcgctaccgttaacttccccgcaagtcgcaactacaatttccgcctgcggggttgcggcaacaacaataatcttgcccgtgtggacctgaggatcgacggacggaccgtcgggaccttttattaccagggcacatacccctgggaggccccaattgacaatgtttatgtcagtgcggggagtcatacagtcgaaatcactgttactgcggataacggcacatgggacgtgtatgccgactacctggtgatacagtgactcgagggggggcccggtacccaattcgccctatagtgagtcgtattacaattcactggccgtcgttttacaacgtcgtgactgggaaaaccctggcgttacccaacttaatcgccttgcagcacatccccctttcgccagctggcgtaatagcgaagaggcccgcaccgatcgcccttcccaacagttgcgcagcctgaatggcgaatggaaattgtaagcgttaatattttgttaaaattcgcgttaaatttttgttaaatcagctcattttttaaccaataggccgaaatcggcaaaatcccttataaatcaaaagaatagaccgagatagggttgagtgttgttccagtttggaacaagagtccactattaaagaacgtggactccaacgtcaaagggcgaaaaaccgtctatcagggcgatggcccactacgtgaaccatcaccctaatcaagttttttggggtcgaggtgccgtaaagcactaaatcggaaccctaaagggagcccccgatttagagcttgacggggaaagccggcgaacgtggcgagaaaggaagggaagaaagcgaaaggagcgggcgctagggcgctggcaagtgtagcggtcacgctgcgcgtaaccaccacacccgccgcgcttaatgcgccgctacagggcgcgtcaggtg

SEQ ID NO: 3055 - DNA, 5312 bp, Artificial Sequence
  Synthetic Construct, AS-55 intein modified protein encoding nucleic acids in pBluescript
gcacttttcggggaaatgtgcgcggaacccctatttgtttatttttctaaatacattcaaatatgtatccgctcatgagacaataaccctgataaatgcttcaataatattgaaaaaggaagagtatgagtattcaacatttccgtgtcgcccttattcccttttttgcggcattttgccttcctgtttttgctcacccagaaacgctggtgaaagtaaaagatgctgaagatcagttgggtgcacgagtgggttacatcgaactggatctcaacagcggtaagatccttgagagttttcgccccgaagaacgttttccaatgatgagcacttttaaagttctgctatgtggcgcggtattatcccgtattgacgccgggcaagagcaactcggtcgccgcatacactattctcagaatgacttggttgagtactcaccagtcacagaaaagcatcttacggatggcatgacagtaagagaattatgcagtgctgccataaccatgagtgataacactgcggccaacttacttctgacaacgatcggaggaccgaaggagctaaccgcttttttgcacaacatgggggatcatgtaactcgccttgatcgttgggaaccggagctgaatgaagccataccaaacgacgagcgtgacaccacgatgcctgtagcaatggcaacaacgttgcgcaaactattaactggcgaactacttactctagcttcccggcaacaattaatagactggatggaggcggataaagttgcaggaccacttctgcgctcggcccttccggctggctggtttattgctgataaatctggagccggtgagcgtgggtctcgcggtatcattgcagcactggggccagatggtaagccctcccgtatcgtagttatctacacgacggggagtcaggcaactatggatgaacgaaatagacagatcgctgagataggtgcctcactgattaagcattggtaactgtcagaccaagtttactcatatatactttagattgatttaaaacttcatttttaatttaaaaggatctaggtgaagatcctttttgataatctcatgaccaaaatcccttaacgtgagttttcgttccactgagcgtcagaccccgtagaaaagatcaaaggatcttcttgagatcctttttttctgcgcgtaatctgctgcttgcaaacaaaaaaaccaccgctaccagcggtggtttgtttgccggatcaagagctaccaactctttttccgaaggtaactggcttcagcagagcgcagataccaaatactgtccttctagtgtagccgtagttaggccaccacttcaagaactctgtagcaccgcctacatacctcgctctgctaatcctgttaccagtggctgctgccagtggcgataagtcgtgtcttaccgggttggactcaagacgatagttaccggataaggcgcagcggtcgggctgaacggggggttcgtgcacacagcccagcttggagcgaacgacctacaccgaactgagatacctacagcgtgagctatgagaaagcgccacgcttcccgaagggagaaaggcggacaggtatccggtaagcggcagggtcggaacaggagagcgcacgagggagcttccagggggaaacgcctggtatctttatagtcctgtcgggtttcgccacctctgacttgagcgtcgatttttgtgatgctcgtcaggggggcggagcctatggaaaaacgccagcaacgcggcctttttacggttcctggccttttgctggccttttgctcacatgttctttcctgcgttatcccctgattctgtggataaccgtattaccgcctttgagtgagctgataccgctcgccgcagccgaacgaccgagcgcagcgagtcagtgagcgaggaagcggaagagcgcccaatacgcaaaccgcctctccccgcgcgttggccgattcattaatgcagctggcacgacaggtttcccgactggaaagcgggcagtgagcgcaacgcaattaatgtgagttagctcactcattaggcaccccaggctttacactttatgcttccggctcgtatgttgtgtggaattgtgagcggataacaatttcacacaggaaacagcatatgcaaacaagcattactctgacatccaacgcatccggtacgtttgacggttactattacgaactctggaaggatactggcaatacaacaatgacggtctacactcaaggtcgcttttcctgccagtggtcgaacatcaataacgcgttgtttaggaccgggaagaaatacaaccagaattggcagtctcttggcacaatccggatcacgtactctgcgacttacaacccaaacgggaactcctacttgtgtatctatggctggtctaccaacccattggtcgagttctacatcgttgagtcctgggggaactggagaccgcctggtgccacgtccctgggccaagtgacaatcgatggcgggacctacgacatctataggacgacacgcgtcaaccagccttgcctgacaccggacacatacgtggttctcggggacgggcggattgagactattgaggacatcgtgaatgctaaggagcgcaacgtgctctccctggacctcgataacctcagcatcaagattgacacggcgatcaagttctggaagctgcgctacaacggcaatctgagcaagatcacactctcgaacaattacgagctcaaggctactccggaccactgcctcctggtgctgagggataaccagctcaagtggatccccgccaaggacattaaggagaacgattacatcgcgatgccgttcaattacaaggtcgagcggaagcccatctccctcctgaacctcctgaagtacctggacatcacagatgttctcattgagttcgacgagaactccactatcttcgagaagattgccgagtacatccgcaacaatattaagacctcaacgaagtacaagtacctcaggaaccgcagggtcccgctgaagtacctcatcgagtggaatttcgacctggatgagattgagaaggaggctaagtacatctacaagtccgttgccgggaccaagaagatccccctgttcaagctcgacgagaggttctggtacttcgctggcctggtcctcggcgacgggtcgatccaggattctaagatccggattgcccagaccccactgaaggacgtgaagagcattctcgatgagacgttccctttcctgcacaactggatctcgggcaatcaggtcatcatttctaacccaatcattgccgagatcctggagaagctcggcatgaggaacgggaagctcaatggcatcattttctcactgcctgagtcctacatcaacgccctcattgcggggtacttcgacaccgatggctgcttctcgctcctgtacgacaagaaggcgaagaagcacaacctgcgcatggtcctcacgtcaaagcggcgcgatgttctggagaagatcgggatctacctcaactccatcggcattctgaatacactccataagtctagggaggtgtactcactcatcatttccaacaagagcctggagactttcaaggagaagatcgcgaagtacctgaagattcggaaggaggctttcatcaacggctacaagacatacaagaaggagcatgaggagcgcttcgagtgcgacctcctgccagttaaggaggtgttcaagaagctcaccttcgagaagggccggaaggagatcctgaaggactccaagatccacattgagaactggtacaaggagaagaccaacaatatcccgagggagaagctgaagacggttctccggtacgcgaacaatagcgagcataaggagttcctggagaagatcgtgaacggggacatttcgttcgtgcgcgtcaagaaggtggagaatatcccgtacgatggctacgtctacgatctctctatcaagcataatcagaacttcatctctaatggggtcatttcacacaactccattgtggggacagccacgttcgatcagtactggagcgtgcgcacctctaagcggacttcaggaacagtgaccgtgaccgatcacttccgcgcctgggcgaaccggggcctgaacctcggcacaatagaccaaattacattgtgcgtggagggttaccaaagctctggatcagccaacatcacccagaacaccttctctcagggctcttcttccggcagttcgggtggctcatccggctccacaacgactactcgcatcgagtgtgagaacatgtccttgtccggaccctacgttagcaggatcaccaatccctttaatggtattgcgctgtacgccaacggagacacagcccgcgctaccgttaacttccccgcaagtcgcaactacaatttccgcctgcggggttgcggcaacaacaataatcttgcccgtgtggacctgaggatcgacggacggaccgtcgggaccttttattaccagggcacatacccctgggaggccccaattgacaatgtttatgtcagtgcggggagtcatacagtcgaaatcactgttactgcggataacggcacatgggacgtgtatgccgactacctggtgatacagtgactcgagggggggcccggtacccaattcgccctatagtgagtcgtattacaattcactggccgtcgttttacaacgtcgtgactgggaaaaccctggcgttacccaacttaatcgccttgcagcacatccccctttcgccagctggcgtaatagcgaagaggcccgcaccgatcgcccttcccaacagttgcgcagcctgaatggcgaatggaaattgtaagcgttaatattttgttaaaattcgcgttaaatttttgttaaatcagctcattttttaaccaataggccgaaatcggcaaaatcccttataaatcaaaagaatagaccgagatagggttgagtgttgttccagtttggaacaagagtccactattaaagaacgtggactccaacgtcaaagggcgaaaaaccgtctatcagggcgatggcccactacgtgaaccatcaccctaatcaagttttttggggtcgaggtgccgtaaagcactaaatcggaaccctaaagggagcccccgatttagagcttgacggggaaagccggcgaacgtggcgagaaaggaagggaagaaagcgaaaggagcgggcgctagggcgctggcaagtgtagcggtcacgctgcgcgtaaccaccacacccgccgcgcttaatgcgccgctacagggcgcgtcaggtg

SEQ ID NO: 3056 - DNA, 5189 bp, Artificial Sequence
  Synthetic Construct, AS-56 intein modified protein encoding nucleic acids in pBluescript
gcacttttcggggaaatgtgcgcggaacccctatttgtttatttttctaaatacattcaaatatgtatccgctcatgagacaataaccctgataaatgcttcaataatattgaaaaaggaagagtatgagtattcaacatttccgtgtcgcccttattcccttttttgcggcattttgccttcctgtttttgctcacccagaaacgctggtgaaagtaaaagatgctgaagatcagttgggtgcacgagtgggttacatcgaactggatctcaacagcggtaagatccttgagagttttcgccccgaagaacgttttccaatgatgagcacttttaaagttctgctatgtggcgcggtattatcccgtattgacgccgggcaagagcaactcggtcgccgcatacactattctcagaatgacttggttgagtactcaccagtcacagaaaagcatcttacggatggcatgacagtaagagaattatgcagtgctgccataaccatgagtgataacactgcggccaacttacttctgacaacgatcggaggaccgaaggagctaaccgcttttttgcacaacatgggggatcatgtaactcgccttgatcgttgggaaccggagctgaatgaagccataccaaacgacgagcgtgacaccacgatgcctgtagcaatggcaacaacgttgcgcaaactattaactggcgaactacttactctagcttcccggcaacaattaatagactggatggaggcggataaagttgcaggaccacttctgcgctcggcccttccggctggctggtttattgctgataaatctggagccggtgagcgtgggtctcgcggtatcattgcagcactggggccagatggtaagccctcccgtatcgtagttatctacacgacggggagtcaggcaactatggatgaacgaaatagacagatcgctgagataggtgcctcactgattaagcattggtaactgtcagaccaagtttactcatatatactttagattgatttaaaacttcatttttaatttaaaaggatctaggtgaagatcctttttgataatctcatgaccaaaatcccttaacgtgagttttcgttccactgagcgtcagaccccgtagaaaagatcaaaggatcttcttgagatcctttttttctgcgcgtaatctgctgcttgcaaacaaaaaaaccaccgctaccagcggtggtttgtttgccggatcaagagctaccaactctttttccgaaggtaactggcttcagcagagcgcagataccaaatactgtccttctagtgtagccgtagttaggccaccacttcaagaactctgtagcaccgcctacatacctcgctctgctaatcctgttaccagtggctgctgccagtggcgataagtcgtgtcttaccgggttggactcaagacgatagttaccggataaggcgcagcggtcgggctgaacggggggttcgtgcacacagcccagcttggagcgaacgacctacaccgaactgagatacctacagcgtgagctatgagaaagcgccacgcttcccgaagggagaaaggcggacaggtatccggtaagcggcagggtcggaacaggagagcgcacgagggagcttccagggggaaacgcctggtatctttatagtcctgtcgggtttcgccacctctgacttgagcgtcgatttttgtgatgctcgtcaggggggcggagcctatggaaaaacgccagcaacgcggcctttttacggttcctggccttttgctggccttttgctcacatgttctttcctgcgttatcccctgattctgtggataaccgtattaccgcctttgagtgagctgataccgctcgccgcagccgaacgaccgagcgcagcgagtcagtgagcgaggaagcggaagagcgcccaatacgcaaaccgcctctccccgcgcgttggccgattcattaatgcagctggcacgacaggtttcccgactggaaagcgggcagtgagcgcaacgcaattaatgtgagttagctcactcattaggcaccccaggctttacactttatgcttccggctcgtatgttgtgtggaattgtgagcggataacaatttcacacaggaaacagcatatgcaaacaagcattactctgacatccaacgcatccggtacgtttgacggttactattacgaactctggaaggatactggcaatacaacaatgacggtctacactcaaggtcgcttttcctgccagtggtcgaacatcaataacgcgttgtttaggaccgggaagaaatacaaccagaattggcagtctcttggcacaatccggatcacgtactctgcgacttacaacccaaacgggaactcctacttgtgtatctatggctggtctaccaacccattggtcgagttctacatcgttgagtcctgggggaactggagaccgcctggtgccacgtccctgggccaagtgacaatcgatggcgggacctacgacatctataggacgacacgcgtcaaccagccttcgctggggcgggatgagctgattttcattaaggagggggacaagctgaaggtttgcaagatcggggaggctattgatgagttcatggagaagtacaaggataagatcattgttgatggggacacggagatcctgtacctcgacggcattgctgaggtgtacaccatctccgtgaacgtcaagacggggaaggccgagttcaagagggtctacgcgatcagccgccacaagccgaggggcaaggtctacaaggttatcggcaaggacgggacctctatcattgttacggaggatcactcactcttcaactacgacgagaacggcaatctggtttgcgtgaagccgcgccagatgaagcatatcattaggaacttcaacaatccctacgatgtggagtaccggatcggcgactacattgagacaaattaccagaggactgattccaagtacaacagccggcagaatgacattcccgagaagctcaagatcacaaaggagctgtgccagttcctgggcctcttcgtcgcggaggggtcatacatcactaacggcatctccattaccacgaaggacgatgacatcgctaagttcattgagcggttcgtgaaggagcagatcaacgagaatattgccgtcaagcgctacgaggattcggtgcggttcgtcaacaaggggttctaccgcttcctcaaggagcacatcaatggcaaggcgattaacaagaatagcccggagttcatcctgaagggcgacaaggagatgaagctggctttcctcggcgggctgatctcgggcgatggctacgtgtccaaggacggccgcgtgcagatctacacaacttccgagcagctcctggggcagctccatctcctgctcagcgacctgggcatgatctactcgattacaaagatcaaggaggagggcgagaagatcgagattaagcggaacgagatcgtccgcaattacaagctctacgttatcgagattgccaagaactgcaccgaggacctgaagccctacgtgatccccaagtacaagaaggagaggatcaagccagcgaactacgatcagctcccttacgactaccggatcattaaggagcacctgcgcaagatcaccgataagaagccatacaacgactacgcctggaagtccaacaatcgcaagctgaagctcaacacgctggagaagatcgagcagctcaatccacatctgagggaggagattaacaagttcaagctgaatatccctttcgagattaaggagatcaaggagattgactacaacggctacgtctacgatctctcagtggaggataatgagaacttcatcacagctacaggcatcctctgccacaactccattgtggggacagccacgttcgatcagtactggagcgtgcgcacctctaagcggacttcaggaacagtgaccgtgaccgatcacttccgcgcctgggcgaaccggggcctgaacctcggcacaatagaccaaattacattgtgcgtggagggttaccaaagctctggatcagccaacatcacccagaacaccttctctcagggctcttcttccggcagttcgggtggctcatccggctccacaacgactactcgcatcgagtgtgagaacatgtccttgtccggaccctacgttagcaggatcaccaatccctttaatggtattgcgctgtacgccaacggagacacagcccgcgctaccgttaacttccccgcaagtcgcaactacaatttccgcctgcggggttgcggcaacaacaataatcttgcccgtgtggacctgaggatcgacggacggaccgtcgggaccttttattaccagggcacatacccctgggaggccccaattgacaatgtttatgtcagtgcggggagtcatacagtcgaaatcactgttactgcggataacggcacatgggacgtgtatgccgactacctggtgatacagtgactcgagggggggcccggtacccaattcgccctatagtgagtcgtattacaattcactggccgtcgttttacaacgtcgtgactgggaaaaccctggcgttacccaacttaatcgccttgcagcacatccccctttcgccagctggcgtaatagcgaagaggcccgcaccgatcgcccttcccaacagttgcgcagcctgaatggcgaatggaaattgtaagcgttaatattttgttaaaattcgcgttaaatttttgttaaatcagctcattttttaaccaataggccgaaatcggcaaaatcccttataaatcaaaagaatagaccgagatagggttgagtgttgttccagtttggaacaagagtccactattaaagaacgtggactccaacgtcaaagggcgaaaaaccgtctatcagggcgatggcccactacgtgaaccatcaccctaatcaagttttttggggtcgaggtgccgtaaagcactaaatcggaaccctaaagggagcccccgatttagagcttgacggggaaagccggcgaacgtggcgagaaaggaagggaagaaagcgaaaggagcgggcgctagggcgctggcaagtgtagcggtcacgctgcgcgtaaccaccacacccgccgcgcttaatgcgccgctacagggcgcgtcaggtg

SEQ ID NO: 3057 - DNA, 5429 bp, Artificial Sequence
  Synthetic Construct, AS-57 intein modified protein encoding nucleic acids in pBluescript
gcacttttcggggaaatgtgcgcggaacccctatttgtttatttttctaaatacattcaaatatgtatccgctcatgagacaataaccctgataaatgcttcaataatattgaaaaaggaagagtatgagtattcaacatttccgtgtcgcccttattcccttttttgcggcattttgccttcctgtttttgctcacccagaaacgctggtgaaagtaaaagatgctgaagatcagttgggtgcacgagtgggttacatcgaactggatctcaacagcggtaagatccttgagagttttcgccccgaagaacgttttccaatgatgagcacttttaaagttctgctatgtggcgcggtattatcccgtattgacgccgggcaagagcaactcggtcgccgcatacactattctcagaatgacttggttgagtactcaccagtcacagaaaagcatcttacggatggcatgacagtaagagaattatgcagtgctgccataaccatgagtgataacactgcggccaacttacttctgacaacgatcggaggaccgaaggagctaaccgcttttttgcacaacatgggggatcatgtaactcgccttgatcgttgggaaccggagctgaatgaagccataccaaacgacgagcgtgacaccacgatgcctgtagcaatggcaacaacgttgcgcaaactattaactggcgaactacttactctagcttcccggcaacaattaatagactggatggaggcggataaagttgcaggaccacttctgcgctcggcccttccggctggctggtttattgctgataaatctggagccggtgagcgtgggtctcgcggtatcattgcagcactggggccagatggtaagccctcccgtatcgtagttatctacacgacggggagtcaggcaactatggatgaacgaaatagacagatcgctgagataggtgcctcactgattaagcattggtaactgtcagaccaagtttactcatatatactttagattgatttaaaacttcatttttaatttaaaaggatctaggtgaagatcctttttgataatctcatgaccaaaatcccttaacgtgagttttcgttccactgagcgtcagaccccgtagaaaagatcaaaggatcttcttgagatcctttttttctgcgcgtaatctgctgcttgcaaacaaaaaaaccaccgctaccagcggtggtttgtttgccggatcaagagctaccaactctttttccgaaggtaactggcttcagcagagcgcagataccaaatactgtccttctagtgtagccgtagttaggccaccacttcaagaactctgtagcaccgcctacatacctcgctctgctaatcctgttaccagtggctgctgccagtggcgataagtcgtgtcttaccgggttggactcaagacgatagttaccggataaggcgcagcggtcgggctgaacggggggttcgtgcacacagcccagcttggagcgaacgacctacaccgaactgagatacctacagcgtgagctatgagaaagcgccacgcttcccgaagggagaaaggcggacaggtatccggtaagcggcagggtcggaacaggagagcgcacgagggagcttccagggggaaacgcctggtatctttatagtcctgtcgggtttcgccacctctgacttgagcgtcgatttttgtgatgctcgtcaggggggcggagcctatggaaaaacgccagcaacgcggcctttttacggttcctggccttttgctggccttttgctcacatgttctttcctgcgttatcccctgattctgtggataaccgtattaccgcctttgagtgagctgataccgctcgccgcagccgaacgaccgagcgcagcgagtcagtgagcgaggaagcggaagagcgcccaatacgcaaaccgcctctccccgcgcgttggccgattcattaatgcagctggcacgacaggtttcccgactggaaagcgggcagtgagcgcaacgcaattaatgtgagttagctcactcattaggcaccccaggctttacactttatgcttccggctcgtatgttgtgtggaattgtgagcggataacaatttcacacaggaaacagcatatgcaaacaagcattactctgacatccaacgcatccggtacgtttgacggttactattacgaactctggaaggatactggcaatacaacaatgacggtctacactcaaggtcgcttttcctgccagtggtcgaacatcaataacgcgttgtttaggaccgggaagaaatacaaccagaattggcagtctcttggcacaatccggatcacgtactctgcgacttacaacccaaacgggaactcctacttgtgtatctatggctggtctaccaacccattggtcgagttctacatcgttgagtcctgggggaactggagaccgcctggtgccacgtccctgggccaagtgacaatcgatggcgggacctacgacatctataggacgacacgcgtcaaccagccttcgctcccttacgatgagaagatcctcattttcgagaataacgagtacaagctggtcaagatcggggagttcgtggagaagtacctcaaccgctacaaggacagggccatcacctacggcgataacaatatcgaggtgtacattaaggacgagaatatctacgccccatcgttcgacaaggatggcaagatcgtcctgaagcctatcacgcacgcgattcggcatcgcgggaaggagatctacgagattgagctggagtcgggcaagaaggttagggtgaccggggaccactctgtgttcacgatcaacgacaatctggatgtggtcgaggtcaaggctagcgacctcaaggttggcgatttcatcattacaccgaagatcattccctcaatctccaaggacaagatctacctctcggagatcgtcaagaacaaggacaagtactacgttaagatcaaggatcacatcaagttcattgaggagcatgaggagatcctcaaggagtcctacaaggagtacaagactaagtggaaggacctgaagccggttctcaagaagaagaacgcgttccggctcgatctgatcgaggacctggtcgataaggagaagatcgagaagatttcttacggccacgctaactacatcaacaataagattaagctcgacgagaagttcggctacctgatcggggccttcctctcagagggccattggaacgacaagtgcgtggagatttccagcaccaacaaggagttcatcgagaatctggtcgagatcattgaggagattctcggcaaggacgcgtactacatcacagtgaagggggacaagcgcaggtacaaggacctctacgtgatcggcctcaacaagactgtcgctatgatcttcgagtccctcgggctgaacaagctgtcgtctaataaggagatcccgagcattctcctgtcgaatgagacgttcctgaagggcctcatcaaggggtacattgacggcgatgggtcaatctacgtcgacgagtctaagcgggattactcaatccgcctgtacaccacgtccgagacactccgcgacactctctgcctggcgctcaagatcctgggcattaactaccggctctccatcgacaagaagagcaaggttaacgagaattggcgcgattgctacgtgatcaagattaccggcaaggagaacattgagaagctcctggacgtcgagatcaagaacaatggcgggaaggatgttatcccgaagattgccgagaagttcaaggagatcattaaccagtactcccagagggagtggaaggagcggttcggcattgacgtgaacaatctgcatatctgggaggatctcaagaagggctacatgagcaggtaccgggcgaagaaggttctcaacattatgaagaatgtgaaggagatcgaggagaagtacggcaggctcctggacaagatcgggcagctgattgacaacgatctcctgttcgagcgcatcaagagcattagggtgctcgacgagatccccgagtatgtgtacgatatttccgtggagggcacagagaacttcattgggggggagggcttcatttgcctgcataattccattgtggggacagccacgttcgatcagtactggagcgtgcgcacctctaagcggacttcaggaacagtgaccgtgaccgatcacttccgcgcctgggcgaaccggggcctgaacctcggcacaatagaccaaattacattgtgcgtggagggttaccaaagctctggatcagccaacatcacccagaacaccttctctcagggctcttcttccggcagttcgggtggctcatccggctccacaacgactactcgcatcgagtgtgagaacatgtccttgtccggaccctacgttagcaggatcaccaatccctttaatggtattgcgctgtacgccaacggagacacagcccgcgctaccgttaacttccccgcaagtcgcaactacaatttccgcctgcggggttgcggcaacaacaataatcttgcccgtgtggacctgaggatcgacggacggaccgtcgggaccttttattaccagggcacatacccctgggaggccccaattgacaatgtttatgtcagtgcggggagtcatacagtcgaaatcactgttactgcggataacggcacatgggacgtgtatgccgactacctggtgatacagtgactcgagggggggcccggtacccaattcgccctatagtgagtcgtattacaattcactggccgtcgttttacaacgtcgtgactgggaaaaccctggcgttacccaacttaatcgccttgcagcacatccccctttcgccagctggcgtaatagcgaagaggcccgcaccgatcgcccttcccaacagttgcgcagcctgaatggcgaatggaaattgtaagcgttaatattttgttaaaattcgcgttaaatttttgttaaatcagctcattttttaaccaataggccgaaatcggcaaaatcccttataaatcaaaagaatagaccgagatagggttgagtgttgttccagtttggaacaagagtccactattaaagaacgtggactccaacgtcaaagggcgaaaaaccgtctatcagggcgatggcccactacgtgaaccatcaccctaatcaagttttttggggtcgaggtgccgtaaagcactaaatcggaaccctaaagggagcccccgatttagagcttgacggggaaagccggcgaacgtggcgagaaaggaagggaagaaagcgaaaggagcgggcgctagggcgctggcaagtgtagcggtcacgctgcgcgtaaccaccacacccgccgcgcttaatgcgccgctacagggcgcgtcaggtg

SEQ ID NO: 3058 - DNA, 5186 bp, Artificial Sequence
  Synthetic Construct, AS-58 intein modified protein encoding nucleic acids in pBluescript
gcacttttcggggaaatgtgcgcggaacccctatttgtttatttttctaaatacattcaaatatgtatccgctcatgagacaataaccctgataaatgcttcaataatattgaaaaaggaagagtatgagtattcaacatttccgtgtcgcccttattcccttttttgcggcattttgccttcctgtttttgctcacccagaaacgctggtgaaagtaaaagatgctgaagatcagttgggtgcacgagtgggttacatcgaactggatctcaacagcggtaagatccttgagagttttcgccccgaagaacgttttccaatgatgagcacttttaaagttctgctatgtggcgcggtattatcccgtattgacgccgggcaagagcaactcggtcgccgcatacactattctcagaatgacttggttgagtactcaccagtcacagaaaagcatcttacggatggcatgacagtaagagaattatgcagtgctgccataaccatgagtgataacactgcggccaacttacttctgacaacgatcggaggaccgaaggagctaaccgcttttttgcacaacatgggggatcatgtaactcgccttgatcgttgggaaccggagctgaatgaagccataccaaacgacgagcgtgacaccacgatgcctgtagcaatggcaacaacgttgcgcaaactattaactggcgaactacttactctagcttcccggcaacaattaatagactggatggaggcggataaagttgcaggaccacttctgcgctcggcccttccggctggctggtttattgctgataaatctggagccggtgagcgtgggtctcgcggtatcattgcagcactggggccagatggtaagccctcccgtatcgtagttatctacacgacggggagtcaggcaactatggatgaacgaaatagacagatcgctgagataggtgcctcactgattaagcattggtaactgtcagaccaagtttactcatatatactttagattgatttaaaacttcatttttaatttaaaaggatctaggtgaagatcctttttgataatctcatgaccaaaatcccttaacgtgagttttcgttccactgagcgtcagaccccgtagaaaagatcaaaggatcttcttgagatcctttttttctgcgcgtaatctgctgcttgcaaacaaaaaaaccaccgctaccagcggtggtttgtttgccggatcaagagctaccaactctttttccgaaggtaactggcttcagcagagcgcagataccaaatactgtccttctagtgtagccgtagttaggccaccacttcaagaactctgtagcaccgcctacatacctcgctctgctaatcctgttaccagtggctgctgccagtggcgataagtcgtgtcttaccgggttggactcaagacgatagttaccggataaggcgcagcggtcgggctgaacggggggttcgtgcacacagcccagcttggagcgaacgacctacaccgaactgagatacctacagcgtgagctatgagaaagcgccacgcttcccgaagggagaaaggcggacaggtatccggtaagcggcagggtcggaacaggagagcgcacgagggagcttccagggggaaacgcctggtatctttatagtcctgtcgggtttcgccacctctgacttgagcgtcgatttttgtgatgctcgtcaggggggcggagcctatggaaaaacgccagcaacgcggcctttttacggttcctggccttttgctggccttttgctcacatgttctttcctgcgttatcccctgattctgtggataaccgtattaccgcctttgagtgagctgataccgctcgccgcagccgaacgaccgagcgcagcgagtcagtgagcgaggaagcggaagagcgcccaatacgcaaaccgcctctccccgcgcgttggccgattcattaatgcagctggcacgacaggtttcccgactggaaagcgggcagtgagcgcaacgcaattaatgtgagttagctcactcattaggcaccccaggctttacactttatgcttccggctcgtatgttgtgtggaattgtgagcggataacaatttcacacaggaaacagcatatgcaaacaagcattactctgacatccaacgcatccggtacgtttgacggttactattacgaactctggaaggatactggcaatacaacaatgacggtctacactcaaggtcgcttttcctgccagtggtcgaacatcaataacgcgttgtttaggaccgggaagaaatacaaccagaattggcagtctcttggcacaatccggatcacgtactctgcgacttacaacccaaacgggaactcctacttgtgtatctatggctggtctaccaacccattggtcgagttctacatcgttgagtcctgggggaactggagaccgcctggtgccacgtccctgggccaagtgacaatcgatggcgggacctacgacatctataggacgacacgcgtcaaccagccttgcgtggacggggatactacagtgctgctggacggcaagctcatcaagatcaaggatctggaggacaagtggaaggacgtgaaggtcctcacatcggacgatctgaacccgaagctcacttccctgagcaagtactggaagctcaatgctgacgagtacgggaagaagatctacaagattaagaccgagctgggccgggagatcattgcgacggaggatcaccccttctacaccacgaacggccgcaagaggtgcggggagctcaaagtgggcgacgaggtcatcatctacccgaacgatttccccatgttcgaggacgataatagggttattgtggacgaggagaagatcaagaaggtcatcaacaacattggcgggacctacaagaacaagatcattaatgagctgaaggacaggaagctcatcccgctgacgtacaacgatcagaaggctagcattctcgcccggatcgttggccacgtgatgggcgacgggtctctcatcatcaacaacaagaactcccgcgtggtcttccgcggcgacattgaggatctcaagaccatcaaggaggacctcaaggagctgggctacgatggggaggagatcaagctgcatgagggggagaccgagatcacggactacaacggcaagaagcgcatcattaagggcaaggggtacagcttcgaggtgaggaagaagtcgctctgcatcctcctgaaggctctgggctgcgtcggcggggacaagacaaagaagatgtacggcattccaaactggatcaagactgcgcctaagtacatcaagaaggagttcctctcggcttacttcggctctgagctgacaactccgaagatccgcaaccacggcacctcattcaaggagctctccttcaagatcgcgaagattgaggagatcttcgacgaggataggttcattaaggacatcaaggagatgctcaaggagttcggcatcgagctgaaggtcagggttgaggaggggaacctccggaaggatggctacaagacaaaggtctacgtggcctccatctacaaccataaggagttcttcggccggatcgggtacacctacgcgaataagaaggagacgctggcccgctacgcgtacgagtacctcctgacgaaggagaagtacctcaaggaccgcaacatcaagaagctggagaacaatacaaagttcattactttcgataagttcatcaaggagaagtgcctgaagaatggcttcgttaaggagaagattgtcagcatcgaggagaccaaggtcgactacgtttacgatattactactatttcagagactcataacttcattgctaatggcttcctcacgggcaactccattgtggggacagccacgttcgatcagtactggagcgtgcgcacctctaagcggacttcaggaacagtgaccgtgaccgatcacttccgcgcctgggcgaaccggggcctgaacctcggcacaatagaccaaattacattgtgcgtggagggttaccaaagctctggatcagccaacatcacccagaacaccttctctcagggctcttcttccggcagttcgggtggctcatccggctccacaacgactactcgcatcgagtgtgagaacatgtccttgtccggaccctacgttagcaggatcaccaatccctttaatggtattgcgctgtacgccaacggagacacagcccgcgctaccgttaacttccccgcaagtcgcaactacaatttccgcctgcggggttgcggcaacaacaataatcttgcccgtgtggacctgaggatcgacggacggaccgtcgggaccttttattaccagggcacatacccctgggaggccccaattgacaatgtttatgtcagtgcggggagtcatacagtcgaaatcactgttactgcggataacggcacatgggacgtgtatgccgactacctggtgatacagtgactcgagggggggcccggtacccaattcgccctatagtgagtcgtattacaattcactggccgtcgttttacaacgtcgtgactgggaaaaccctggcgttacccaacttaatcgccttgcagcacatccccctttcgccagctggcgtaatagcgaagaggcccgcaccgatcgcccttcccaacagttgcgcagcctgaatggcgaatggaaattgtaagcgttaatattttgttaaaattcgcgttaaatttttgttaaatcagctcattttttaaccaataggccgaaatcggcaaaatcccttataaatcaaaagaatagaccgagatagggttgagtgttgttccagtttggaacaagagtccactattaaagaacgtggactccaacgtcaaagggcgaaaaaccgtctatcagggcgatggcccactacgtgaaccatcaccctaatcaagttttttggggtcgaggtgccgtaaagcactaaatcggaaccctaaagggagcccccgatttagagcttgacggggaaagccggcgaacgtggcgagaaaggaagggaagaaagcgaaaggagcgggcgctagggcgctggcaagtgtagcggtcacgctgcgcgtaaccaccacacccgccgcgcttaatgcgccgctacagggcgcgtcaggtg

SEQ ID NO: 3059 - DNA, 5243 bp, Artificial Sequence
  Synthetic Construct, AS-59 intein modified protein encoding nucleic acids in pBluescript
gcacttttcggggaaatgtgcgcggaacccctatttgtttatttttctaaatacattcaaatatgtatccgctcatgagacaataaccctgataaatgcttcaataatattgaaaaaggaagagtatgagtattcaacatttccgtgtcgcccttattcccttttttgcggcattttgccttcctgtttttgctcacccagaaacgctggtgaaagtaaaagatgctgaagatcagttgggtgcacgagtgggttacatcgaactggatctcaacagcggtaagatccttgagagttttcgccccgaagaacgttttccaatgatgagcacttttaaagttctgctatgtggcgcggtattatcccgtattgacgccgggcaagagcaactcggtcgccgcatacactattctcagaatgacttggttgagtactcaccagtcacagaaaagcatcttacggatggcatgacagtaagagaattatgcagtgctgccataaccatgagtgataacactgcggccaacttacttctgacaacgatcggaggaccgaaggagctaaccgcttttttgcacaacatgggggatcatgtaactcgccttgatcgttgggaaccggagctgaatgaagccataccaaacgacgagcgtgacaccacgatgcctgtagcaatggcaacaacgttgcgcaaactattaactggcgaactacttactctagcttcccggcaacaattaatagactggatggaggcggataaagttgcaggaccacttctgcgctcggcccttccggctggctggtttattgctgataaatctggagccggtgagcgtgggtctcgcggtatcattgcagcactggggccagatggtaagccctcccgtatcgtagttatctacacgacggggagtcaggcaactatggatgaacgaaatagacagatcgctgagataggtgcctcactgattaagcattggtaactgtcagaccaagtttactcatatatactttagattgatttaaaacttcatttttaatttaaaaggatctaggtgaagatcctttttgataatctcatgaccaaaatcccttaacgtgagttttcgttccactgagcgtcagaccccgtagaaaagatcaaaggatcttcttgagatcctttttttctgcgcgtaatctgctgcttgcaaacaaaaaaaccaccgctaccagcggtggtttgtttgccggatcaagagctaccaactctttttccgaaggtaactggcttcagcagagcgcagataccaaatactgtccttctagtgtagccgtagttaggccaccacttcaagaactctgtagcaccgcctacatacctcgctctgctaatcctgttaccagtggctgctgccagtggcgataagtcgtgtcttaccgggttggactcaagacgatagttaccggataaggcgcagcggtcgggctgaacggggggttcgtgcacacagcccagcttggagcgaacgacctacaccgaactgagatacctacagcgtgagctatgagaaagcgccacgcttcccgaagggagaaaggcggacaggtatccggtaagcggcagggtcggaacaggagagcgcacgagggagcttccagggggaaacgcctggtatctttatagtcctgtcgggtttcgccacctctgacttgagcgtcgatttttgtgatgctcgtcaggggggcggagcctatggaaaaacgccagcaacgcggcctttttacggttcctggccttttgctggccttttgctcacatgttctttcctgcgttatcccctgattctgtggataaccgtattaccgcctttgagtgagctgataccgctcgccgcagccgaacgaccgagcgcagcgagtcagtgagcgaggaagcggaagagcgcccaatacgcaaaccgcctctccccgcgcgttggccgattcattaatgcagctggcacgacaggtttcccgactggaaagcgggcagtgagcgcaacgcaattaatgtgagttagctcactcattaggcaccccaggctttacactttatgcttccggctcgtatgttgtgtggaattgtgagcggataacaatttcacacaggaaacagcatatgcaaacaagcattactctgacatccaacgcatccggtacgtttgacggttactattacgaactctggaaggatactggcaatacaacaatgacggtctacactcaaggtcgcttttcctgccagtggtcgaacatcaataacgcgttgtttaggaccgggaagaaatacaaccagaattggcagtctcttggcacaatccggatcacgtactctgcgacttacaacccaaacgggaactcctacttgtgtatctatggctggtctaccaacccattggtcgagttctacatcgttgagtcctgggggaactggagaccgcctggtgccacgtccctgggccaagtgacaatcgatggcgggacctacgacatctataggacgacacgcgtcaaccagccttcgctgccatacgaggagaagattattattaaggagggggagttcattaagccagtggagatcgggaagctcgtggatgagatgattgagcgcttcggcttcgagaagatcgggaactctgaggtctgcgacctcccgatcgatatctacgccctctcactggaccaggatgagaaggtgcactggaagcggatcatttcgtgcatccgccacaagcataatggcaagctgatcaagattaagaccaagagcgggagggagattaccgcgacgccgtaccactcgttcgtcatccggaaggataacaagatcattcccgttaagggctccgagctcaagatcggggacaggattccggtggtcaagcatatccccgcgaattgcgttgaggctatcaacatttccgactacgtgagcggcaattacgttgtggataacatcaacaataagattgccccaaagatcaacggcaagtccattcctaacaatatcaagctcgactacgatttcggctacttcatcgggatctacctcgcggagggcagcgtcaccaagtacttcgttagcatctcgaatgtggacgagctcattctgaacaagatccgggccttcgcggacaagctcggcctgaactacggggagtacgataacaataacggcttcgcggagtcgcatgacatccgcatctactcctccaccctcgctgagttcctgtctaatttcggcacctcgtctaacacgaagaagatcgccgagttcgtgttcggggcgaacaaggagttcgtccggggcctcatcagggggtacttcgacggcgatgggaatgtcaacgccgacaggaaggtcattcgggttacatctaactcaaaggagctcatcgacggcatcgctattctcctggcccgcttcaatatcttcagcattaagacaaagactaagaaccagttcgtgctgatcattccccaccgctacgcgaagaagttccatgaggagatcaatttctcggtcgagaagaagaagtccgagctggagaggctggtgtcatccctgaacgacgataagacatacgactcaatcgatatgattccatccatcggcgatgctctcactaagctgggggagaaggtcgactaccctaaggttatcctcaagaagttcgagcggaagcagaagatcggcagggctaccctccagaggcacctgcgcaggatcgaggagctggctgtgaagaagggcgtcaacatcctcgccctgaaggagtactggctcctgaagaaggccgttgagtccgacgtgatctgggatgagattgtcaagatcgaggagattagctgcgacaagaagtatgtgtacgatatttctgtggaggggctggagactttcactactttcgatggggttctcactcataattccattgtggggacagccacgttcgatcagtactggagcgtgcgcacctctaagcggacttcaggaacagtgaccgtgaccgatcacttccgcgcctgggcgaaccggggcctgaacctcggcacaatagaccaaattacattgtgcgtggagggttaccaaagctctggatcagccaacatcacccagaacaccttctctcagggctcttcttccggcagttcgggtggctcatccggctccacaacgactactcgcatcgagtgtgagaacatgtccttgtccggaccctacgttagcaggatcaccaatccctttaatggtattgcgctgtacgccaacggagacacagcccgcgctaccgttaacttccccgcaagtcgcaactacaatttccgcctgcggggttgcggcaacaacaataatcttgcccgtgtggacctgaggatcgacggacggaccgtcgggaccttttattaccagggcacatacccctgggaggccccaattgacaatgtttatgtcagtgcggggagtcatacagtcgaaatcactgttactgcggataacggcacatgggacgtgtatgccgactacctggtgatacagtgactcgagggggggcccggtacccaattcgccctatagtgagtcgtattacaattcactggccgtcgttttacaacgtcgtgactgggaaaaccctggcgttacccaacttaatcgccttgcagcacatccccctttcgccagctggcgtaatagcgaagaggcccgcaccgatcgcccttcccaacagttgcgcagcctgaatggcgaatggaaattgtaagcgttaatattttgttaaaattcgcgttaaatttttgttaaatcagctcattttttaaccaataggccgaaatcggcaaaatcccttataaatcaaaagaatagaccgagatagggttgagtgttgttccagtttggaacaagagtccactattaaagaacgtggactccaacgtcaaagggcgaaaaaccgtctatcagggcgatggcccactacgtgaaccatcaccctaatcaagttttttggggtcgaggtgccgtaaagcactaaatcggaaccctaaagggagcccccgatttagagcttgacggggaaagccggcgaacgtggcgagaaaggaagggaagaaagcgaaaggagcgggcgctagggcgctggcaagtgtagcggtcacgctgcgcgtaaccaccacacccgccgcgcttaatgcgccgctacagggcgcgtcaggtg

SEQ ID NO: 3060 - DNA, 5294 bp, Artificial Sequence
  Synthetic Construct, AS-60 intein modified protein encoding nucleic acids in pBluescript
gcacttttcggggaaatgtgcgcggaacccctatttgtttatttttctaaatacattcaaatatgtatccgctcatgagacaataaccctgataaatgcttcaataatattgaaaaaggaagagtatgagtattcaacatttccgtgtcgcccttattcccttttttgcggcattttgccttcctgtttttgctcacccagaaacgctggtgaaagtaaaagatgctgaagatcagttgggtgcacgagtgggttacatcgaactggatctcaacagcggtaagatccttgagagttttcgccccgaagaacgttttccaatgatgagcacttttaaagttctgctatgtggcgcggtattatcccgtattgacgccgggcaagagcaactcggtcgccgcatacactattctcagaatgacttggttgagtactcaccagtcacagaaaagcatcttacggatggcatgacagtaagagaattatgcagtgctgccataaccatgagtgataacactgcggccaacttacttctgacaacgatcggaggaccgaaggagctaaccgcttttttgcacaacatgggggatcatgtaactcgccttgatcgttgggaaccggagctgaatgaagccataccaaacgacgagcgtgacaccacgatgcctgtagcaatggcaacaacgttgcgcaaactattaactggcgaactacttactctagcttcccggcaacaattaatagactggatggaggcggataaagttgcaggaccacttctgcgctcggcccttccggctggctggtttattgctgataaatctggagccggtgagcgtgggtctcgcggtatcattgcagcactggggccagatggtaagccctcccgtatcgtagttatctacacgacggggagtcaggcaactatggatgaacgaaatagacagatcgctgagataggtgcctcactgattaagcattggtaactgtcagaccaagtttactcatatatactttagattgatttaaaacttcatttttaatttaaaaggatctaggtgaagatcctttttgataatctcatgaccaaaatcccttaacgtgagttttcgttccactgagcgtcagaccccgtagaaaagatcaaaggatcttcttgagatcctttttttctgcgcgtaatctgctgcttgcaaacaaaaaaaccaccgctaccagcggtggtttgtttgccggatcaagagctaccaactctttttccgaaggtaactggcttcagcagagcgcagataccaaatactgtccttctagtgtagccgtagttaggccaccacttcaagaactctgtagcaccgcctacatacctcgctctgctaatcctgttaccagtggctgctgccagtggcgataagtcgtgtcttaccgggttggactcaagacgatagttaccggataaggcgcagcggtcgggctgaacggggggttcgtgcacacagcccagcttggagcgaacgacctacaccgaactgagatacctacagcgtgagctatgagaaagcgccacgcttcccgaagggagaaaggcggacaggtatccggtaagcggcagggtcggaacaggagagcgcacgagggagcttccagggggaaacgcctggtatctttatagtcctgtcgggtttcgccacctctgacttgagcgtcgatttttgtgatgctcgtcaggggggcggagcctatggaaaaacgccagcaacgcggcctttttacggttcctggccttttgctggccttttgctcacatgttctttcctgcgttatcccctgattctgtggataaccgtattaccgcctttgagtgagctgataccgctcgccgcagccgaacgaccgagcgcagcgagtcagtgagcgaggaagcggaagagcgcccaatacgcaaaccgcctctccccgcgcgttggccgattcattaatgcagctggcacgacaggtttcccgactggaaagcgggcagtgagcgcaacgcaattaatgtgagttagctcactcattaggcaccccaggctttacactttatgcttccggctcgtatgttgtgtggaattgtgagcggataacaatttcacacaggaaacagcatatgcaaacaagcattactctgacatccaacgcatccggtacgtttgacggttactattacgaactctggaaggatactggcaatacaacaatgacggtctacactcaaggtcgcttttcctgccagtggtcgaacatcaataacgcgttgtttaggaccgggaagaaatacaaccagaattggcagtctcttggcacaatccggatcacgtactctgcgacttacaacccaaacgggaactcctacttgtgtatctatggctggtctaccaacccattggtcgagttctacatcgttgagtcctgggggaactggagaccgcctggtgccacgtccctgggccaagtgacaatcgatggcgggacctacgacatctataggacgacacgcgtcaaccagccttgcctgacatcaaattcaaagatcctgacagacgatggctactacattaagctggagaagctcaaggagaagctggacctgcatattaagatctacaacaccgaggagggcgagaagtccagcaatattctgttcgtgtcggagcgctacgcggatgagaagatcattcggatcaagaccgagtcggggagggtcctggagggctctaaggaccacccggtgctgacgctcaacggctacgtgcccatgggcatgctcaaggagggggacgatgtgatcgtctacccatacgagggcgtggagtacgaggagccttccgacgagatcattctcgatgaggacgatttcgcggagtacgacaagcagatcattaagtacctgaaggataggggcctcctgccgctccggatggacaacaagaatatcggcatcattgctaggctcctggggttcgccttcggcgatgggagcatcgtgaaggagaacggcgacagggagaggctctacgtggccttctacgggaagagggagaccctcatcaagattcgggaggacctggagaagctcggcatcaaggccagccgcatctactcccgcaagcgcgaggtcgagatcaggaacgcgtacggcgacgagtacacatccctgtgcgaggataattctatcaagattacttcaaaggccttcgcgctgttcatgcataagctcgggatgcccatcggcaagaagacggagcagatctacaagattccagagtggatcaagaaggcccctaagtgggttaagcggaacttcctggctggcctcttcggggctgacggctctcgcgcggtcttcaagaactacaccccgctgcccatcaatctcacgatgtcgaagtctgaggagctcaaggagaacatcctggagttcctcaatgagattaagctcctgctcgctgagttcgatatcgagtcaatgatctacgagattaagtccctggacggccgcgttagctacaggctcgccatcgtgggcgaggagtcaattaagaacttcctggggcgcatcaattacgagtactccggcgagaagaaggtcatcgggctgctcgcgtacgagtacctccgcaggaaggacatcgctaaggagattcgcaagaagtgcatcaagagggcgaaggagctgtacaagaagggcgttacagtgagcgagatgctcaagatggatgagttcaggaacgagttcatctcgaagcggctgattgagcgcgctgtctacgagaatctcgacgaggacgatgttcggatctccactaagttcccgaagttcgaggagttcatcgagaagtacggcgtcattggcgggttcgttatcgataagattaaggagatcgaggagatttcatacgactccaagctgtacgacgtgggcatcgtttcaaaggagcataacttcattgctaacagcatcgtggttcataattccattgtggggacagccacgttcgatcagtactggagcgtgcgcacctctaagcggacttcaggaacagtgaccgtgaccgatcacttccgcgcctgggcgaaccggggcctgaacctcggcacaatagaccaaattacattgtgcgtggagggttaccaaagctctggatcagccaacatcacccagaacaccttctctcagggctcttcttccggcagttcgggtggctcatccggctccacaacgactactcgcatcgagtgtgagaacatgtccttgtccggaccctacgttagcaggatcaccaatccctttaatggtattgcgctgtacgccaacggagacacagcccgcgctaccgttaacttccccgcaagtcgcaactacaatttccgcctgcggggttgcggcaacaacaataatcttgcccgtgtggacctgaggatcgacggacggaccgtcgggaccttttattaccagggcacatacccctgggaggccccaattgacaatgtttatgtcagtgcggggagtcatacagtcgaaatcactgttactgcggataacggcacatgggacgtgtatgccgactacctggtgatacagtgactcgagggggggcccggtacccaattcgccctatagtgagtcgtattacaattcactggccgtcgttttacaacgtcgtgactgggaaaaccctggcgttacccaacttaatcgccttgcagcacatccccctttcgccagctggcgtaatagcgaagaggcccgcaccgatcgcccttcccaacagttgcgcagcctgaatggcgaatggaaattgtaagcgttaatattttgttaaaattcgcgttaaatttttgttaaatcagctcattttttaaccaataggccgaaatcggcaaaatcccttataaatcaaaagaatagaccgagatagggttgagtgttgttccagtttggaacaagagtccactattaaagaacgtggactccaacgtcaaagggcgaaaaaccgtctatcagggcgatggcccactacgtgaaccatcaccctaatcaagttttttggggtcgaggtgccgtaaagcactaaatcggaaccctaaagggagcccccgatttagagcttgacggggaaagccggcgaacgtggcgagaaaggaagggaagaaagcgaaaggagcgggcgctagggcgctggcaagtgtagcggtcacgctgcgcgtaaccaccacacccgccgcgcttaatgcgccgctacagggcgcgtcaggtg

SEQ ID NO: 3061 - DNA, 4835 bp, Artificial Sequence
  Synthetic Construct, AS-61 intein modified protein encoding nucleic acids in pBluescript
gcacttttcggggaaatgtgcgcggaacccctatttgtttatttttctaaatacattcaaatatgtatccgctcatgagacaataaccctgataaatgcttcaataatattgaaaaaggaagagtatgagtattcaacatttccgtgtcgcccttattcccttttttgcggcattttgccttcctgtttttgctcacccagaaacgctggtgaaagtaaaagatgctgaagatcagttgggtgcacgagtgggttacatcgaactggatctcaacagcggtaagatccttgagagttttcgccccgaagaacgttttccaatgatgagcacttttaaagttctgctatgtggcgcggtattatcccgtattgacgccgggcaagagcaactcggtcgccgcatacactattctcagaatgacttggttgagtactcaccagtcacagaaaagcatcttacggatggcatgacagtaagagaattatgcagtgctgccataaccatgagtgataacactgcggccaacttacttctgacaacgatcggaggaccgaaggagctaaccgcttttttgcacaacatgggggatcatgtaactcgccttgatcgttgggaaccggagctgaatgaagccataccaaacgacgagcgtgacaccacgatgcctgtagcaatggcaacaacgttgcgcaaactattaactggcgaactacttactctagcttcccggcaacaattaatagactggatggaggcggataaagttgcaggaccacttctgcgctcggcccttccggctggctggtttattgctgataaatctggagccggtgagcgtgggtctcgcggtatcattgcagcactggggccagatggtaagccctcccgtatcgtagttatctacacgacggggagtcaggcaactatggatgaacgaaatagacagatcgctgagataggtgcctcactgattaagcattggtaactgtcagaccaagtttactcatatatactttagattgatttaaaacttcatttttaatttaaaaggatctaggtgaagatcctttttgataatctcatgaccaaaatcccttaacgtgagttttcgttccactgagcgtcagaccccgtagaaaagatcaaaggatcttcttgagatcctttttttctgcgcgtaatctgctgcttgcaaacaaaaaaaccaccgctaccagcggtggtttgtttgccggatcaagagctaccaactctttttccgaaggtaactggcttcagcagagcgcagataccaaatactgtccttctagtgtagccgtagttaggccaccacttcaagaactctgtagcaccgcctacatacctcgctctgctaatcctgttaccagtggctgctgccagtggcgataagtcgtgtcttaccgggttggactcaagacgatagttaccggataaggcgcagcggtcgggctgaacggggggttcgtgcacacagcccagcttggagcgaacgacctacaccgaactgagatacctacagcgtgagctatgagaaagcgccacgcttcccgaagggagaaaggcggacaggtatccggtaagcggcagggtcggaacaggagagcgcacgagggagcttccagggggaaacgcctggtatctttatagtcctgtcgggtttcgccacctctgacttgagcgtcgatttttgtgatgctcgtcaggggggcggagcctatggaaaaacgccagcaacgcggcctttttacggttcctggccttttgctggccttttgctcacatgttctttcctgcgttatcccctgattctgtggataaccgtattaccgcctttgagtgagctgataccgctcgccgcagccgaacgaccgagcgcagcgagtcagtgagcgaggaagcggaagagcgcccaatacgcaaaccgcctctccccgcgcgttggccgattcattaatgcagctggcacgacaggtttcccgactggaaagcgggcagtgagcgcaacgcaattaatgtgagttagctcactcattaggcaccccaggctttacactttatgcttccggctcgtatgttgtgtggaattgtgagcggataacaatttcacacaggaaacagcatatgcaaacaagcattactctgacatccaacgcatccggtacgtttgacggttactattacgaactctggaaggatactggcaatacaacaatgacggtctacactcaaggtcgcttttcctgccagtggtcgaacatcaataacgcgttgtttaggaccgggaagaaatacaaccagaattggcagtctcttggcacaatccggatcacgtactctgcgacttacaacccaaacgggaactcctacttgtgtatctatggctggtctaccaacccattggtcgagttctacatcgttgagtcctgggggaactggagaccgcctggtgccacgtccctgggccaagtgacaatcgatggcgggacctacgacatctataggacgacacgcgtcaaccagccttcggtggactacaatgagcctattattattaaggagaatggggagattaaggtcgtgaagatcggggagctgattgacaagattattgagaactccgagaatatccgcagggagggcatcctggagattgccaagtgcaaggggatcgaggttattgcgttcaactcgaattacaagttcaagttcatgccagtttcggaggtgtctaggcaccctgtgtctgagatgttcgagatcgtggtcgagggcaacaagaaggtcagggttacacggtcccatagcgtcttcactatccgggacaatgaggttgtgccgatccgcgtggacgagctgaaggtcggggatatcctggttctcgcgaaggagctccccaacatcgaggaggacatcgagattgataagaagttctcaaagatcctgggctacatcattgctgaggggtactacgacgataagaagatcgtgctctcttacgactacaacgagaaggagttcatcaatgagaccattgattacttcaagtcactgaactccgacatcacgatctacagcaaggatctcaatatccagattgaggtgaagaacaagaagatcattaatctcctgaagaagctgcgcgtcaagaacaagaggatcccgagcatcattttcaagtcgccctacgagatcaagaagtctttcatcgacggcattttcaacgggaaggatgctaaggtgttcgtctcaaaggagctcgccgaggacgtgatcttcctcctgctccagattaaggagaacgccacaatcaataagaagtcgatcaacgatattgaggtctacgaggttcggcgcatcaccaacatctacacgaatcggaagctggagaagctcatcaactccgacttcattttcctcaagatcaaggagattaataaggtcgagccgacgagcggctacgcgtacgacctcactgttccaaatgcggagaatttcgttgctggcttcgggggcttcgtgctccacaattccattgtggggacagccacgttcgatcagtactggagcgtgcgcacctctaagcggacttcaggaacagtgaccgtgaccgatcacttccgcgcctgggcgaaccggggcctgaacctcggcacaatagaccaaattacattgtgcgtggagggttaccaaagctctggatcagccaacatcacccagaacaccttctctcagggctcttcttccggcagttcgggtggctcatccggctccacaacgactactcgcatcgagtgtgagaacatgtccttgtccggaccctacgttagcaggatcaccaatccctttaatggtattgcgctgtacgccaacggagacacagcccgcgctaccgttaacttccccgcaagtcgcaactacaatttccgcctgcggggttgcggcaacaacaataatcttgcccgtgtggacctgaggatcgacggacggaccgtcgggaccttttattaccagggcacatacccctgggaggccccaattgacaatgtttatgtcagtgcggggagtcatacagtcgaaatcactgttactgcggataacggcacatgggacgtgtatgccgactacctggtgatacagtgactcgagggggggcccggtacccaattcgccctatagtgagtcgtattacaattcactggccgtcgttttacaacgtcgtgactgggaaaaccctggcgttacccaacttaatcgccttgcagcacatccccctttcgccagctggcgtaatagcgaagaggcccgcaccgatcgcccttcccaacagttgcgcagcctgaatggcgaatggaaattgtaagcgttaatattttgttaaaattcgcgttaaatttttgttaaatcagctcattttttaaccaataggccgaaatcggcaaaatcccttataaatcaaaagaatagaccgagatagggttgagtgttgttccagtttggaacaagagtccactattaaagaacgtggactccaacgtcaaagggcgaaaaaccgtctatcagggcgatggcccactacgtgaaccatcaccctaatcaagttttttggggtcgaggtgccgtaaagcactaaatcggaaccctaaagggagcccccgatttagagcttgacggggaaagccggcgaacgtggcgagaaaggaagggaagaaagcgaaaggagcgggcgctagggcgctggcaagtgtagcggtcacgctgcgcgtaaccaccacacccgccgcgcttaatgcgccgctacagggcgcgtcaggtg

SEQ ID NO: 3062 - DNA, 5192 bp, Artificial Sequence
  Synthetic Construct, AS-62 intein modified protein encoding nucleic acids in pBluescript
gcacttttcggggaaatgtgcgcggaacccctatttgtttatttttctaaatacattcaaatatgtatccgctcatgagacaataaccctgataaatgcttcaataatattgaaaaaggaagagtatgagtattcaacatttccgtgtcgcccttattcccttttttgcggcattttgccttcctgtttttgctcacccagaaacgctggtgaaagtaaaagatgctgaagatcagttgggtgcacgagtgggttacatcgaactggatctcaacagcggtaagatccttgagagttttcgccccgaagaacgttttccaatgatgagcacttttaaagttctgctatgtggcgcggtattatcccgtattgacgccgggcaagagcaactcggtcgccgcatacactattctcagaatgacttggttgagtactcaccagtcacagaaaagcatcttacggatggcatgacagtaagagaattatgcagtgctgccataaccatgagtgataacactgcggccaacttacttctgacaacgatcggaggaccgaaggagctaaccgcttttttgcacaacatgggggatcatgtaactcgccttgatcgttgggaaccggagctgaatgaagccataccaaacgacgagcgtgacaccacgatgcctgtagcaatggcaacaacgttgcgcaaactattaactggcgaactacttactctagcttcccggcaacaattaatagactggatggaggcggataaagttgcaggaccacttctgcgctcggcccttccggctggctggtttattgctgataaatctggagccggtgagcgtgggtctcgcggtatcattgcagcactggggccagatggtaagccctcccgtatcgtagttatctacacgacggggagtcaggcaactatggatgaacgaaatagacagatcgctgagataggtgcctcactgattaagcattggtaactgtcagaccaagtttactcatatatactttagattgatttaaaacttcatttttaatttaaaaggatctaggtgaagatcctttttgataatctcatgaccaaaatcccttaacgtgagttttcgttccactgagcgtcagaccccgtagaaaagatcaaaggatcttcttgagatcctttttttctgcgcgtaatctgctgcttgcaaacaaaaaaaccaccgctaccagcggtggtttgtttgccggatcaagagctaccaactctttttccgaaggtaactggcttcagcagagcgcagataccaaatactgtccttctagtgtagccgtagttaggccaccacttcaagaactctgtagcaccgcctacatacctcgctctgctaatcctgttaccagtggctgctgccagtggcgataagtcgtgtcttaccgggttggactcaagacgatagttaccggataaggcgcagcggtcgggctgaacggggggttcgtgcacacagcccagcttggagcgaacgacctacaccgaactgagatacctacagcgtgagctatgagaaagcgccacgcttcccgaagggagaaaggcggacaggtatccggtaagcggcagggtcggaacaggagagcgcacgagggagcttccagggggaaacgcctggtatctttatagtcctgtcgggtttcgccacctctgacttgagcgtcgatttttgtgatgctcgtcaggggggcggagcctatggaaaaacgccagcaacgcggcctttttacggttcctggccttttgctggccttttgctcacatgttctttcctgcgttatcccctgattctgtggataaccgtattaccgcctttgagtgagctgataccgctcgccgcagccgaacgaccgagcgcagcgagtcagtgagcgaggaagcggaagagcgcccaatacgcaaaccgcctctccccgcgcgttggccgattcattaatgcagctggcacgacaggtttcccgactggaaagcgggcagtgagcgcaacgcaattaatgtgagttagctcactcattaggcaccccaggctttacactttatgcttccggctcgtatgttgtgtggaattgtgagcggataacaatttcacacaggaaacagcatatgcaaacaagcattactctgacatccaacgcatccggtacgtttgacggttactattacgaactctggaaggatactggcaatacaacaatgacggtctacactcaaggtcgcttttcctgccagtggtcgaacatcaataacgcgttgtttaggaccgggaagaaatacaaccagaattggcagtctcttggcacaatccggatcacgtactctgcgacttacaacccaaacgggaactcctacttgtgtatctatggctggtctaccaacccattggtcgagttctacatcgttgagtcctgggggaactggagaccgcctggtgccacgtccctgggccaagtgacaatcgatggcgggacctacgacatctataggacgacacgcgtcaaccagccttgcttccatccggatgaggttctcttcattgatcgggggcgggggctggagtgcattactttcaaggagctgttcgagctggaggacaaggacaacgtgaagatcctctccttcgatggcgagaagctcagcctgaagaagctcaagctggcctccaagcgctactacaatgacgatctcatcaccctgcggttcaacctcggccgcgagatcaagattacgaaggaccacccagtggtcattctggaggatggcgagctcaagatcaagctgacatctgacgtgaaggagggggataaggtcatcctgccctacggcaacttcggggaggagagggagatcgagattgacatcctggaggagctgagcaagacagatctcattgagaaagtgtggatccacaacaaggacctggcgactaatgagttcaacatcattaagccatacctctcgaataagtaccctcatgacgtcaagaggaacggcaccatccgggctaaggacattctcccgatcaaggagattctggataagtacgggtccaagaaccggctgttcacggcgaagtcgaagtctaccacgatcccctacaagattaagatcgacaaggatttcgctcggctcattggctactacctgagcgaggggtggatctcgaaggactacggccgcaacggggttgtgcgcaagaggattggcctctgcttcgggatccacgaggaggagtacattaacgacgttaagaatatcctcaacaagctgggcatcaagtacattgagaagatcaaggatgggtcacattccattctcatctccagcaagatcctggcttacgtcttcgagaatattctgaactgcggcatcaactgctacaataagaacatcccgccccagatgttcaatgccaaggaggagatcaagtgggagttcctcaagggcctgttccgcggggacggcgggatcgtcaggctcaacaataacaagaatctgaacatcgagttcgccaccgtttctaagaagatggcgcactcactcctgattctcctgcagctcctgggcatcgtcgcttcggttaagaagtgctacaataacaagtctacaactatggcctacatcattaggattaacggcctggagcaggtcaagaagatcggcgagctgttcgggaagaagtgggagaattacaaggacattgccgagtcatacaagcggaacatcgagccgctcggctacaagaagtccgataatttcgcgatcctggaggttaaggagatcattaaggagcattactccggctacgtgtactcagtggagacagagaactcactgctcattacaagctacggcatcctcattcacaactccattgtggggacagccacgttcgatcagtactggagcgtgcgcacctctaagcggacttcaggaacagtgaccgtgaccgatcacttccgcgcctgggcgaaccggggcctgaacctcggcacaatagaccaaattacattgtgcgtggagggttaccaaagctctggatcagccaacatcacccagaacaccttctctcagggctcttcttccggcagttcgggtggctcatccggctccacaacgactactcgcatcgagtgtgagaacatgtccttgtccggaccctacgttagcaggatcaccaatccctttaatggtattgcgctgtacgccaacggagacacagcccgcgctaccgttaacttccccgcaagtcgcaactacaatttccgcctgcggggttgcggcaacaacaataatcttgcccgtgtggacctgaggatcgacggacggaccgtcgggaccttttattaccagggcacatacccctgggaggccccaattgacaatgtttatgtcagtgcggggagtcatacagtcgaaatcactgttactgcggataacggcacatgggacgtgtatgccgactacctggtgatacagtgactcgagggggggcccggtacccaattcgccctatagtgagtcgtattacaattcactggccgtcgttttacaacgtcgtgactgggaaaaccctggcgttacccaacttaatcgccttgcagcacatccccctttcgccagctggcgtaatagcgaagaggcccgcaccgatcgcccttcccaacagttgcgcagcctgaatggcgaatggaaattgtaagcgttaatattttgttaaaattcgcgttaaatttttgttaaatcagctcattttttaaccaataggccgaaatcggcaaaatcccttataaatcaaaagaatagaccgagatagggttgagtgttgttccagtttggaacaagagtccactattaaagaacgtggactccaacgtcaaagggcgaaaaaccgtctatcagggcgatggcccactacgtgaaccatcaccctaatcaagttttttggggtcgaggtgccgtaaagcactaaatcggaaccctaaagggagcccccgatttagagcttgacggggaaagccggcgaacgtggcgagaaaggaagggaagaaagcgaaaggagcgggcgctagggcgctggcaagtgtagcggtcacgctgcgcgtaaccaccacacccgccgcgcttaatgcgccgctacagggcgcgtcaggtg

SEQ ID NO: 3063 - DNA, 5012 bp, Artificial Sequence
  Synthetic Construct, AS-63 intein modified protein encoding nucleic acids in pBluescript
gcacttttcggggaaatgtgcgcggaacccctatttgtttatttttctaaatacattcaaatatgtatccgctcatgagacaataaccctgataaatgcttcaataatattgaaaaaggaagagtatgagtattcaacatttccgtgtcgcccttattcccttttttgcggcattttgccttcctgtttttgctcacccagaaacgctggtgaaagtaaaagatgctgaagatcagttgggtgcacgagtgggttacatcgaactggatctcaacagcggtaagatccttgagagttttcgccccgaagaacgttttccaatgatgagcacttttaaagttctgctatgtggcgcggtattatcccgtattgacgccgggcaagagcaactcggtcgccgcatacactattctcagaatgacttggttgagtactcaccagtcacagaaaagcatcttacggatggcatgacagtaagagaattatgcagtgctgccataaccatgagtgataacactgcggccaacttacttctgacaacgatcggaggaccgaaggagctaaccgcttttttgcacaacatgggggatcatgtaactcgccttgatcgttgggaaccggagctgaatgaagccataccaaacgacgagcgtgacaccacgatgcctgtagcaatggcaacaacgttgcgcaaactattaactggcgaactacttactctagcttcccggcaacaattaatagactggatggaggcggataaagttgcaggaccacttctgcgctcggcccttccggctggctggtttattgctgataaatctggagccggtgagcgtgggtctcgcggtatcattgcagcactggggccagatggtaagccctcccgtatcgtagttatctacacgacggggagtcaggcaactatggatgaacgaaatagacagatcgctgagataggtgcctcactgattaagcattggtaactgtcagaccaagtttactcatatatactttagattgatttaaaacttcatttttaatttaaaaggatctaggtgaagatcctttttgataatctcatgaccaaaatcccttaacgtgagttttcgttccactgagcgtcagaccccgtagaaaagatcaaaggatcttcttgagatcctttttttctgcgcgtaatctgctgcttgcaaacaaaaaaaccaccgctaccagcggtggtttgtttgccggatcaagagctaccaactctttttccgaaggtaactggcttcagcagagcgcagataccaaatactgtccttctagtgtagccgtagttaggccaccacttcaagaactctgtagcaccgcctacatacctcgctctgctaatcctgttaccagtggctgctgccagtggcgataagtcgtgtcttaccgggttggactcaagacgatagttaccggataaggcgcagcggtcgggctgaacggggggttcgtgcacacagcccagcttggagcgaacgacctacaccgaactgagatacctacagcgtgagctatgagaaagcgccacgcttcccgaagggagaaaggcggacaggtatccggtaagcggcagggtcggaacaggagagcgcacgagggagcttccagggggaaacgcctggtatctttatagtcctgtcgggtttcgccacctctgacttgagcgtcgatttttgtgatgctcgtcaggggggcggagcctatggaaaaacgccagcaacgcggcctttttacggttcctggccttttgctggccttttgctcacatgttctttcctgcgttatcccctgattctgtggataaccgtattaccgcctttgagtgagctgataccgctcgccgcagccgaacgaccgagcgcagcgagtcagtgagcgaggaagcggaagagcgcccaatacgcaaaccgcctctccccgcgcgttggccgattcattaatgcagctggcacgacaggtttcccgactggaaagcgggcagtgagcgcaacgcaattaatgtgagttagctcactcattaggcaccccaggctttacactttatgcttccggctcgtatgttgtgtggaattgtgagcggataacaatttcacacaggaaacagcatatgcaaacaagcattactctgacatccaacgcatccggtacgtttgacggttactattacgaactctggaaggatactggcaatacaacaatgacggtctacactcaaggtcgcttttcctgccagtggtcgaacatcaataacgcgttgtttaggaccgggaagaaatacaaccagaattggcagtctcttggcacaatccggatcacgtactctgcgacttacaacccaaacgggaactcctacttgtgtatctatggctggtctaccaacccattggtcgagttctacatcgttgagtcctgggggaactggagaccgcctggtgccacgtccctgggccaagtgacaatcgatggcgggacctacgacatctataggacgacacgcgtcaaccagccttctattccgggggatgaggtcgtttgggccaaggtggacggggaggccaagctcattcctattgaggatctctacgagctctggaaggagggcagggatgttgaggtggctgctctcacggaggagggggtggtctggtccagcgtcgacagggttgctaggcacaggaggcggacaggcctggtgaagatcattacaaggactgggcgggaggtcatcgttacagaggaccattccgtgttcactgtccgggacggcaagattgtggatgtcccaacctcagagctctccgagggcgattggatcgtcctcccagctaggctgccagctggcgactcagatgagattgacgggatcaagattgacgaggatctcgcgttcctcctgggcctctacgtggctgaggggtccctgaccaaccagaaggacgctgtcaggatccacaataaggatcctgaggtcatcgaggagattgaccgcatcgttagggagaagggctgggaggggcggtactacgagagcgaccattcgtactggatcaagagccggaagctccgccagctgtgcgagaagctcggcactaaggccagggagaagaggctcgggccactcctgtcgctgaagcctgagctcctggctgctgctctgaggggctactacacgggcgacgggtcgttctctgtgaagccgcacggccgctctgccatcattgaggcgaccacggtctcaaagaggctcgctgatgagctcctggtggccctccagattctggacatcgtcgcgcgccgctacgagtgcgacgataccaagggctcgacgcggtaccgcgtgatgattaccaagtctgagtacatccgcacgttcgttgagaaagtgggcttcgcccagtccgagaagaacgagaggatccggaagttcctcgcggagaggaagtggacacgcggcaggtccgatattccgactgagctgatcgggagcccctacacctacgttgaggtggagtacatctctgacagggtggctgctgatggcgggctcatgaaggccgagctggagcatctgtacttcgacaagattaaggagatcgttcccctggatcgcgacgatgagtatgtgtacgacgtcgtggaggttaagctcgggcataatttcgttggggggcagggggttctgctccacaactccattgtggggacagccacgttcgatcagtactggagcgtgcgcacctctaagcggacttcaggaacagtgaccgtgaccgatcacttccgcgcctgggcgaaccggggcctgaacctcggcacaatagaccaaattacattgtgcgtggagggttaccaaagctctggatcagccaacatcacccagaacaccttctctcagggctcttcttccggcagttcgggtggctcatccggctccacaacgactactcgcatcgagtgtgagaacatgtccttgtccggaccctacgttagcaggatcaccaatccctttaatggtattgcgctgtacgccaacggagacacagcccgcgctaccgttaacttccccgcaagtcgcaactacaatttccgcctgcggggttgcggcaacaacaataatcttgcccgtgtggacctgaggatcgacggacggaccgtcgggaccttttattaccagggcacatacccctgggaggccccaattgacaatgtttatgtcagtgcggggagtcatacagtcgaaatcactgttactgcggataacggcacatgggacgtgtatgccgactacctggtgatacagtgactcgagggggggcccggtacccaattcgccctatagtgagtcgtattacaattcactggccgtcgttttacaacgtcgtgactgggaaaaccctggcgttacccaacttaatcgccttgcagcacatccccctttcgccagctggcgtaatagcgaagaggcccgcaccgatcgcccttcccaacagttgcgcagcctgaatggcgaatggaaattgtaagcgttaatattttgttaaaattcgcgttaaatttttgttaaatcagctcattttttaaccaataggccgaaatcggcaaaatcccttataaatcaaaagaatagaccgagatagggttgagtgttgttccagtttggaacaagagtccactattaaagaacgtggactccaacgtcaaagggcgaaaaaccgtctatcagggcgatggcccactacgtgaaccatcaccctaatcaagttttttggggtcgaggtgccgtaaagcactaaatcggaaccctaaagggagcccccgatttagagcttgacggggaaagccggcgaacgtggcgagaaaggaagggaagaaagcgaaaggagcgggcgctagggcgctggcaagtgtagcggtcacgctgcgcgtaaccaccacacccgccgcgcttaatgcgccgctacagggcgcgtcaggtg

SEQ ID NO: 3064 - DNA, 5396 bp, Artificial Sequence
  Synthetic Construct, AS-64 intein modified protein encoding nucleic acids in pBluescript
gcacttttcggggaaatgtgcgcggaacccctatttgtttatttttctaaatacattcaaatatgtatccgctcatgagacaataaccctgataaatgcttcaataatattgaaaaaggaagagtatgagtattcaacatttccgtgtcgcccttattcccttttttgcggcattttgccttcctgtttttgctcacccagaaacgctggtgaaagtaaaagatgctgaagatcagttgggtgcacgagtgggttacatcgaactggatctcaacagcggtaagatccttgagagttttcgccccgaagaacgttttccaatgatgagcacttttaaagttctgctatgtggcgcggtattatcccgtattgacgccgggcaagagcaactcggtcgccgcatacactattctcagaatgacttggttgagtactcaccagtcacagaaaagcatcttacggatggcatgacagtaagagaattatgcagtgctgccataaccatgagtgataacactgcggccaacttacttctgacaacgatcggaggaccgaaggagctaaccgcttttttgcacaacatgggggatcatgtaactcgccttgatcgttgggaaccggagctgaatgaagccataccaaacgacgagcgtgacaccacgatgcctgtagcaatggcaacaacgttgcgcaaactattaactggcgaactacttactctagcttcccggcaacaattaatagactggatggaggcggataaagttgcaggaccacttctgcgctcggcccttccggctggctggtttattgctgataaatctggagccggtgagcgtgggtctcgcggtatcattgcagcactggggccagatggtaagccctcccgtatcgtagttatctacacgacggggagtcaggcaactatggatgaacgaaatagacagatcgctgagataggtgcctcactgattaagcattggtaactgtcagaccaagtttactcatatatactttagattgatttaaaacttcatttttaatttaaaaggatctaggtgaagatcctttttgataatctcatgaccaaaatcccttaacgtgagttttcgttccactgagcgtcagaccccgtagaaaagatcaaaggatcttcttgagatcctttttttctgcgcgtaatctgctgcttgcaaacaaaaaaaccaccgctaccagcggtggtttgtttgccggatcaagagctaccaactctttttccgaaggtaactggcttcagcagagcgcagataccaaatactgtccttctagtgtagccgtagttaggccaccacttcaagaactctgtagcaccgcctacatacctcgctctgctaatcctgttaccagtggctgctgccagtggcgataagtcgtgtcttaccgggttggactcaagacgatagttaccggataaggcgcagcggtcgggctgaacggggggttcgtgcacacagcccagcttggagcgaacgacctacaccgaactgagatacctacagcgtgagctatgagaaagcgccacgcttcccgaagggagaaaggcggacaggtatccggtaagcggcagggtcggaacaggagagcgcacgagggagcttccagggggaaacgcctggtatctttatagtcctgtcgggtttcgccacctctgacttgagcgtcgatttttgtgatgctcgtcaggggggcggagcctatggaaaaacgccagcaacgcggcctttttacggttcctggccttttgctggccttttgctcacatgttctttcctgcgttatcccctgattctgtggataaccgtattaccgcctttgagtgagctgataccgctcgccgcagccgaacgaccgagcgcagcgagtcagtgagcgaggaagcggaagagcgcccaatacgcaaaccgcctctccccgcgcgttggccgattcattaatgcagctggcacgacaggtttcccgactggaaagcgggcagtgagcgcaacgcaattaatgtgagttagctcactcattaggcaccccaggctttacactttatgcttccggctcgtatgttgtgtggaattgtgagcggataacaatttcacacaggaaacagcatatgcaaacaagcattactctgacatccaacgcatccggtacgtttgacggttactattacgaactctggaaggatactggcaatacaacaatgacggtctacactcaaggtcgcttttcctgccagtggtcgaacatcaataacgcgttgtttaggaccgggaagaaatacaaccagaattggcagtctcttggcacaatccggatcacgtactctgcgacttacaacccaaacgggaactcctacttgtgtatctatggctggtctaccaacccattggtcgagttctacatcgttgagtcctgggggaactggagaccgcctggtgccacgtccctgggccaagtgacaatcgatggcgggacctacgacatctataggacgacacgcgtcaaccagccttgcgtggcgccggagacaaagatctgcctcgctgacgggcggttcgttagggccgatgagctgttcgaggagctgaaggagcgggggcgcctggttaagtgcgacgagagcgaggaggtgtacgagctgagggagccagttggggtgtccagcctcgacaaggatgcggtggagatcgtcgagggcaagattacgcacgtgtggcgcctcaaggccgacaagctggtcgaggttgaggtgaagaacggcaggtcgatccggaccacgccagagcataagttcctggtcctcgatccttctggcgagatcgttgagaagagggccgatgagctggagatcggggactacattgtgtgcacccagaagctcgtccacgagggcatgtcggaggaggagctcaagagggaggtgttccgcaggctgggcagggacttcttcgtccatctcccggaggaggaggccgagagcgttctggagctcgcgaaggagcggggcatcaaggctctctgggagacgctggaggtggacattgaggagaactcgttctactaccagctcaggaaggggcgcatcagggccgatattctcgtcgacctggctgaggagctgggcctcgacctggctgatctgtacgacgccgtcgaggtttcatacaggtccaataccaagtccacgaagccaatcaggctcccagagccagaggacctcttctacctggcgggcctcatgttcggcgatgggtgctggaaccagctgaccaatggctccgaggccatccagggggaggtgaagcgcattgcgagcgacatgggcctggaggtgcgcgtgcgccgctacgaggggaagacagcccggatcgacttcccagagactgtgcctcgcattctggaggctctcttcgattacccaaggcggaagaaggcccaccggatccgcgtcaacgatttcctcacaagggcgcctctggactgcatcgctgagttcattcggggctacttcgacgcggatggcacagttgaggaggggcggagcgctgtttcggtgacttcggtctctcgcgagttcctggaggatctccagctcctgctccagaagttcgacgtggcttcttacctgagggagggcgatggggcttacaccctctacgtgtccggcgctaggtcactggagaggttcccagggttcagggagccagagaaggctgagaagctgaagaagctcatggagaaggcctcgtcttcagagctggagaaggtcccgatctccggcgagattctcagggaggtcaggggggacgttcccacaactcgcatgttcaactgctactcaaattacgagggcgggcaagtgggcctcaccaagtccagcctggagaaggtcatctccacgctggaggctgtcggcgttgagggggaggctctggagaggctcaaggctctggcgcgggacgatgtgtgcttcctggaggtggtccgcgttgaggaggtggagtacgacggctacgtctacgacttcacagtggaggagcatcataacttcgctgcggagggcttcgtggttcataattccattgtggggacagccacgttcgatcagtactggagcgtgcgcacctctaagcggacttcaggaacagtgaccgtgaccgatcacttccgcgcctgggcgaaccggggcctgaacctcggcacaatagaccaaattacattgtgcgtggagggttaccaaagctctggatcagccaacatcacccagaacaccttctctcagggctcttcttccggcagttcgggtggctcatccggctccacaacgactactcgcatcgagtgtgagaacatgtccttgtccggaccctacgttagcaggatcaccaatccctttaatggtattgcgctgtacgccaacggagacacagcccgcgctaccgttaacttccccgcaagtcgcaactacaatttccgcctgcggggttgcggcaacaacaataatcttgcccgtgtggacctgaggatcgacggacggaccgtcgggaccttttattaccagggcacatacccctgggaggccccaattgacaatgtttatgtcagtgcggggagtcatacagtcgaaatcactgttactgcggataacggcacatgggacgtgtatgccgactacctggtgatacagtgactcgagggggggcccggtacccaattcgccctatagtgagtcgtattacaattcactggccgtcgttttacaacgtcgtgactgggaaaaccctggcgttacccaacttaatcgccttgcagcacatccccctttcgccagctggcgtaatagcgaagaggcccgcaccgatcgcccttcccaacagttgcgcagcctgaatggcgaatggaaattgtaagcgttaatattttgttaaaattcgcgttaaatttttgttaaatcagctcattttttaaccaataggccgaaatcggcaaaatcccttataaatcaaaagaatagaccgagatagggttgagtgttgttccagtttggaacaagagtccactattaaagaacgtggactccaacgtcaaagggcgaaaaaccgtctatcagggcgatggcccactacgtgaaccatcaccctaatcaagttttttggggtcgaggtgccgtaaagcactaaatcggaaccctaaagggagcccccgatttagagcttgacggggaaagccggcgaacgtggcgagaaaggaagggaagaaagcgaaaggagcgggcgctagggcgctggcaagtgtagcggtcacgctgcgcgtaaccaccacacccgccgcgcttaatgcgccgctacagggcgcgtcaggtg

SEQ ID NO: 3065 - DNA, 4745 bp, Artificial Sequence
  Synthetic Construct, AS-65 intein modified protein encoding nucleic acids in pBluescript
gcacttttcggggaaatgtgcgcggaacccctatttgtttatttttctaaatacattcaaatatgtatccgctcatgagacaataaccctgataaatgcttcaataatattgaaaaaggaagagtatgagtattcaacatttccgtgtcgcccttattcccttttttgcggcattttgccttcctgtttttgctcacccagaaacgctggtgaaagtaaaagatgctgaagatcagttgggtgcacgagtgggttacatcgaactggatctcaacagcggtaagatccttgagagttttcgccccgaagaacgttttccaatgatgagcacttttaaagttctgctatgtggcgcggtattatcccgtattgacgccgggcaagagcaactcggtcgccgcatacactattctcagaatgacttggttgagtactcaccagtcacagaaaagcatcttacggatggcatgacagtaagagaattatgcagtgctgccataaccatgagtgataacactgcggccaacttacttctgacaacgatcggaggaccgaaggagctaaccgcttttttgcacaacatgggggatcatgtaactcgccttgatcgttgggaaccggagctgaatgaagccataccaaacgacgagcgtgacaccacgatgcctgtagcaatggcaacaacgttgcgcaaactattaactggcgaactacttactctagcttcccggcaacaattaatagactggatggaggcggataaagttgcaggaccacttctgcgctcggcccttccggctggctggtttattgctgataaatctggagccggtgagcgtgggtctcgcggtatcattgcagcactggggccagatggtaagccctcccgtatcgtagttatctacacgacggggagtcaggcaactatggatgaacgaaatagacagatcgctgagataggtgcctcactgattaagcattggtaactgtcagaccaagtttactcatatatactttagattgatttaaaacttcatttttaatttaaaaggatctaggtgaagatcctttttgataatctcatgaccaaaatcccttaacgtgagttttcgttccactgagcgtcagaccccgtagaaaagatcaaaggatcttcttgagatcctttttttctgcgcgtaatctgctgcttgcaaacaaaaaaaccaccgctaccagcggtggtttgtttgccggatcaagagctaccaactctttttccgaaggtaactggcttcagcagagcgcagataccaaatactgtccttctagtgtagccgtagttaggccaccacttcaagaactctgtagcaccgcctacatacctcgctctgctaatcctgttaccagtggctgctgccagtggcgataagtcgtgtcttaccgggttggactcaagacgatagttaccggataaggcgcagcggtcgggctgaacggggggttcgtgcacacagcccagcttggagcgaacgacctacaccgaactgagatacctacagcgtgagctatgagaaagcgccacgcttcccgaagggagaaaggcggacaggtatccggtaagcggcagggtcggaacaggagagcgcacgagggagcttccagggggaaacgcctggtatctttatagtcctgtcgggtttcgccacctctgacttgagcgtcgatttttgtgatgctcgtcaggggggcggagcctatggaaaaacgccagcaacgcggcctttttacggttcctggccttttgctggccttttgctcacatgttctttcctgcgttatcccctgattctgtggataaccgtattaccgcctttgagtgagctgataccgctcgccgcagccgaacgaccgagcgcagcgagtcagtgagcgaggaagcggaagagcgcccaatacgcaaaccgcctctccccgcgcgttggccgattcattaatgcagctggcacgacaggtttcccgactggaaagcgggcagtgagcgcaacgcaattaatgtgagttagctcactcattaggcaccccaggctttacactttatgcttccggctcgtatgttgtgtggaattgtgagcggataacaatttcacacaggaaacagcatatgcaaacaagcattactctgacatccaacgcatccggtacgtttgacggttactattacgaactctggaaggatactggcaatacaacaatgacggtctacactcaaggtcgcttttcctgccagtggtcgaacatcaataacgcgttgtttaggaccgggaagaaatacaaccagaattggcagtctcttggcacaatccggatcacgtactctgcgacttacaacccaaacgggaactcctacttgtgtatctatggctggtctaccaacccattggtcgagttctacatcgttgagtcctgggggaactggagaccgcctggtgccacgtccctgggccaagtgacaatcgatggcgggacctacgacatctataggacgacacgcgtcaaccagccttcggtttcggctgatactcctattctcgttaggcgggggggggaggttctgcgggttactttcgaggatctggactcatggtacttcggcgacaggggcggggagtatgtggacgtgtctgacctggaggtcctgaccgttgaccggaacttccgcgtcacgtgggctcgcgttagcaagctgatccggcaccgcgccaggaagattctcagggtgcatctggaggacggcacaatcgagctcactgggaatcacgccgtcatggttctggatgagggcgggctcagggctgtcaaggcttcggagattgaggagggctcattcctcctgtccttcgtggcggagctggacgagcagccaacagatggcgggaccgtggtcacgtccgtcggctcggggtctcgcgtgagcgacaccacgtacgagctgccagtggaggtccgcgttgagctcctgagggagctcgccgacgatggcgtgatcgaggcgagcgaggacgtgtcggtcgatctcgcttggctggcccggatttctggcgtcgagtcacgcgttaccgacgatggggtggagctcgtctgggagacaaggactggcgacctcctgccagctgatccagtgctcaagctggtcgagcggctggagtcggacctggtcgacgacctggagtcttgggtcttcgatggcagggtgtcaaaggaggcggttcggaaggtgctgtccagcgtggacgctaagaacctcaggggggatgctaggagggcttacaggatgctccggaccctggttcgctccgacgtgcatgcggttaaggtggaggacctggatgtcatggactacgatggctacgtgtacgacgtttctgttccaggcaatgagatgttcttcgccggggaggttccagttctgctgcataattccattgtggggacagccacgttcgatcagtactggagcgtgcgcacctctaagcggacttcaggaacagtgaccgtgaccgatcacttccgcgcctgggcgaaccggggcctgaacctcggcacaatagaccaaattacattgtgcgtggagggttaccaaagctctggatcagccaacatcacccagaacaccttctctcagggctcttcttccggcagttcgggtggctcatccggctccacaacgactactcgcatcgagtgtgagaacatgtccttgtccggaccctacgttagcaggatcaccaatccctttaatggtattgcgctgtacgccaacggagacacagcccgcgctaccgttaacttccccgcaagtcgcaactacaatttccgcctgcggggttgcggcaacaacaataatcttgcccgtgtggacctgaggatcgacggacggaccgtcgggaccttttattaccagggcacatacccctgggaggccccaattgacaatgtttatgtcagtgcggggagtcatacagtcgaaatcactgttactgcggataacggcacatgggacgtgtatgccgactacctggtgatacagtgactcgagggggggcccggtacccaattcgccctatagtgagtcgtattacaattcactggccgtcgttttacaacgtcgtgactgggaaaaccctggcgttacccaacttaatcgccttgcagcacatccccctttcgccagctggcgtaatagcgaagaggcccgcaccgatcgcccttcccaacagttgcgcagcctgaatggcgaatggaaattgtaagcgttaatattttgttaaaattcgcgttaaatttttgttaaatcagctcattttttaaccaataggccgaaatcggcaaaatcccttataaatcaaaagaatagaccgagatagggttgagtgttgttccagtttggaacaagagtccactattaaagaacgtggactccaacgtcaaagggcgaaaaaccgtctatcagggcgatggcccactacgtgaaccatcaccctaatcaagttttttggggtcgaggtgccgtaaagcactaaatcggaaccctaaagggagcccccgatttagagcttgacggggaaagccggcgaacgtggcgagaaaggaagggaagaaagcgaaaggagcgggcgctagggcgctggcaagtgtagcggtcacgctgcgcgtaaccaccacacccgccgcgcttaatgcgccgctacagggcgcgtcaggtg

SEQ ID NO: 3066 - DNA, 5276 bp, Artificial Sequence
  Synthetic Construct, AS-66 intein modified protein encoding nucleic acids in pBluescript
gcacttttcggggaaatgtgcgcggaacccctatttgtttatttttctaaatacattcaaatatgtatccgctcatgagacaataaccctgataaatgcttcaataatattgaaaaaggaagagtatgagtattcaacatttccgtgtcgcccttattcccttttttgcggcattttgccttcctgtttttgctcacccagaaacgctggtgaaagtaaaagatgctgaagatcagttgggtgcacgagtgggttacatcgaactggatctcaacagcggtaagatccttgagagttttcgccccgaagaacgttttccaatgatgagcacttttaaagttctgctatgtggcgcggtattatcccgtattgacgccgggcaagagcaactcggtcgccgcatacactattctcagaatgacttggttgagtactcaccagtcacagaaaagcatcttacggatggcatgacagtaagagaattatgcagtgctgccataaccatgagtgataacactgcggccaacttacttctgacaacgatcggaggaccgaaggagctaaccgcttttttgcacaacatgggggatcatgtaactcgccttgatcgttgggaaccggagctgaatgaagccataccaaacgacgagcgtgacaccacgatgcctgtagcaatggcaacaacgttgcgcaaactattaactggcgaactacttactctagcttcccggcaacaattaatagactggatggaggcggataaagttgcaggaccacttctgcgctcggcccttccggctggctggtttattgctgataaatctggagccggtgagcgtgggtctcgcggtatcattgcagcactggggccagatggtaagccctcccgtatcgtagttatctacacgacggggagtcaggcaactatggatgaacgaaatagacagatcgctgagataggtgcctcactgattaagcattggtaactgtcagaccaagtttactcatatatactttagattgatttaaaacttcatttttaatttaaaaggatctaggtgaagatcctttttgataatctcatgaccaaaatcccttaacgtgagttttcgttccactgagcgtcagaccccgtagaaaagatcaaaggatcttcttgagatcctttttttctgcgcgtaatctgctgcttgcaaacaaaaaaaccaccgctaccagcggtggtttgtttgccggatcaagagctaccaactctttttccgaaggtaactggcttcagcagagcgcagataccaaatactgtccttctagtgtagccgtagttaggccaccacttcaagaactctgtagcaccgcctacatacctcgctctgctaatcctgttaccagtggctgctgccagtggcgataagtcgtgtcttaccgggttggactcaagacgatagttaccggataaggcgcagcggtcgggctgaacggggggttcgtgcacacagcccagcttggagcgaacgacctacaccgaactgagatacctacagcgtgagctatgagaaagcgccacgcttcccgaagggagaaaggcggacaggtatccggtaagcggcagggtcggaacaggagagcgcacgagggagcttccagggggaaacgcctggtatctttatagtcctgtcgggtttcgccacctctgacttgagcgtcgatttttgtgatgctcgtcaggggggcggagcctatggaaaaacgccagcaacgcggcctttttacggttcctggccttttgctggccttttgctcacatgttctttcctgcgttatcccctgattctgtggataaccgtattaccgcctttgagtgagctgataccgctcgccgcagccgaacgaccgagcgcagcgagtcagtgagcgaggaagcggaagagcgcccaatacgcaaaccgcctctccccgcgcgttggccgattcattaatgcagctggcacgacaggtttcccgactggaaagcgggcagtgagcgcaacgcaattaatgtgagttagctcactcattaggcaccccaggctttacactttatgcttccggctcgtatgttgtgtggaattgtgagcggataacaatttcacacaggaaacagcatatgcaaacaagcattactctgacatccaacgcatccggtacgtttgacggttactattacgaactctggaaggatactggcaatacaacaatgacggtctacactcaaggtcgcttttcctgccagtggtcgaacatcaataacgcgttgtttaggaccgggaagaaatacaaccagaattggcagtctcttggcacaatccggatcacgtactctgcgacttacaacccaaacgggaactcctacttgtgtatctatggctggtctaccaacccattggtcgagttctacatcgttgagtcctgggggaactggagaccgcctggtgccacgtccctgggccaagtgacaatcgatggcgggacctacgacatctataggacgacacgcgtcaaccagccttgcctcgcgccggggacaaagattctcacggagcatggctgctgggttaaggtggaggatctccctaagatgctgaccgatcagaagctgaaggtttacgacgtggatgagggccgcgaggacgattccgagatcaagttcgtcatggagaggggcattgaggaggacgagagggctgtggtcctcgtgaccgagtcaggcctgacgatcgaggggtccgaggatcacccagtcctcacccctgagggctacgttgagctgggggagattgaggagggcgacctcgttgtggtctacccgttcgagggcgtcgagtacgaggagaaggagggcacgatcctcgacgagtccgatttcgaggacgtggatccccaggtcctcaggtacctggaggagagggacctcatcccactgaggtggagcgatccaaaagtggggacgctcgccaggattctgggcttcgcgatgggcgacgggcacctgggcgagcaggctgggcggctcaccctgtctttctacggcgacgagcgcacgctcagggagctgaagcgcgacctggagtcactgggcgtcaaggcgaacctccatgttcgcaagcgccgctacgagatcgagacagctagcggccgctacgagggggaggctacttcggttgagctgcgggtggcgtcgcgctctttcgctctcctgatggagaagctcggcatgccaagggggcggaaggtggagaccccgtacaaggtccccgattggatcaaggaggcgcctctgtgggtgaagaggaacttcctcgctgggctgttcgctgctgacggctcggttgtgaagttcaagcggtacacaccgctccccatcaatctgactcaggccaaggtcgaggagctggaggagaacctgcgggagttcatgaatgacgtggcgaagctcctgcgcgagttcggcattgagaccacgctgtacgaggtcaagagcaagaagaacgtcgtttacaagctggccatcgtgggcgaggagaatattaagcgcttcctcggcaaggtcgggtacgagtacgatccagagaagaaggtggagggcctcgctgcctacgcgtacctcaagctgaaggagcgcgtcaagaaggacaggaaggaggctgctgagacagctgctgaggtgtacgaggagacaggctccatcactaaggcccatgaggctgtcgctgacgtggtcaacaggaggttcgtggagagggttgtgtacgacggcgggatttccagcgtgcgggtcccagaggatttccctaccttcgagcggttcaaggaggagagggttctcgctggcgggttcgtgatcgaggaggtcgttgaggtcaagggcgttgagccggagtacgacaggttctacgatattggggtttgccacggggctcataacttcattgcggatggggtcgtcgttcataattccattgtggggacagccacgttcgatcagtactggagcgtgcgcacctctaagcggacttcaggaacagtgaccgtgaccgatcacttccgcgcctgggcgaaccggggcctgaacctcggcacaatagaccaaattacattgtgcgtggagggttaccaaagctctggatcagccaacatcacccagaacaccttctctcagggctcttcttccggcagttcgggtggctcatccggctccacaacgactactcgcatcgagtgtgagaacatgtccttgtccggaccctacgttagcaggatcaccaatccctttaatggtattgcgctgtacgccaacggagacacagcccgcgctaccgttaacttccccgcaagtcgcaactacaatttccgcctgcggggttgcggcaacaacaataatcttgcccgtgtggacctgaggatcgacggacggaccgtcgggaccttttattaccagggcacatacccctgggaggccccaattgacaatgtttatgtcagtgcggggagtcatacagtcgaaatcactgttactgcggataacggcacatgggacgtgtatgccgactacctggtgatacagtgactcgagggggggcccggtacccaattcgccctatagtgagtcgtattacaattcactggccgtcgttttacaacgtcgtgactgggaaaaccctggcgttacccaacttaatcgccttgcagcacatccccctttcgccagctggcgtaatagcgaagaggcccgcaccgatcgcccttcccaacagttgcgcagcctgaatggcgaatggaaattgtaagcgttaatattttgttaaaattcgcgttaaatttttgttaaatcagctcattttttaaccaataggccgaaatcggcaaaatcccttataaatcaaaagaatagaccgagatagggttgagtgttgttccagtttggaacaagagtccactattaaagaacgtggactccaacgtcaaagggcgaaaaaccgtctatcagggcgatggcccactacgtgaaccatcaccctaatcaagttttttggggtcgaggtgccgtaaagcactaaatcggaaccctaaagggagcccccgatttagagcttgacggggaaagccggcgaacgtggcgagaaaggaagggaagaaagcgaaaggagcgggcgctagggcgctggcaagtgtagcggtcacgctgcgcgtaaccaccacacccgccgcgcttaatgcgccgctacagggcgcgtcaggtg

SEQ ID NO: 3067 - DNA, 5381 bp, Artificial Sequence
  Synthetic Construct, AS-67 intein modified protein encoding nucleic acids in pBluescript
gcacttttcggggaaatgtgcgcggaacccctatttgtttatttttctaaatacattcaaatatgtatccgctcatgagacaataaccctgataaatgcttcaataatattgaaaaaggaagagtatgagtattcaacatttccgtgtcgcccttattcccttttttgcggcattttgccttcctgtttttgctcacccagaaacgctggtgaaagtaaaagatgctgaagatcagttgggtgcacgagtgggttacatcgaactggatctcaacagcggtaagatccttgagagttttcgccccgaagaacgttttccaatgatgagcacttttaaagttctgctatgtggcgcggtattatcccgtattgacgccgggcaagagcaactcggtcgccgcatacactattctcagaatgacttggttgagtactcaccagtcacagaaaagcatcttacggatggcatgacagtaagagaattatgcagtgctgccataaccatgagtgataacactgcggccaacttacttctgacaacgatcggaggaccgaaggagctaaccgcttttttgcacaacatgggggatcatgtaactcgccttgatcgttgggaaccggagctgaatgaagccataccaaacgacgagcgtgacaccacgatgcctgtagcaatggcaacaacgttgcgcaaactattaactggcgaactacttactctagcttcccggcaacaattaatagactggatggaggcggataaagttgcaggaccacttctgcgctcggcccttccggctggctggtttattgctgataaatctggagccggtgagcgtgggtctcgcggtatcattgcagcactggggccagatggtaagccctcccgtatcgtagttatctacacgacggggagtcaggcaactatggatgaacgaaatagacagatcgctgagataggtgcctcactgattaagcattggtaactgtcagaccaagtttactcatatatactttagattgatttaaaacttcatttttaatttaaaaggatctaggtgaagatcctttttgataatctcatgaccaaaatcccttaacgtgagttttcgttccactgagcgtcagaccccgtagaaaagatcaaaggatcttcttgagatcctttttttctgcgcgtaatctgctgcttgcaaacaaaaaaaccaccgctaccagcggtggtttgtttgccggatcaagagctaccaactctttttccgaaggtaactggcttcagcagagcgcagataccaaatactgtccttctagtgtagccgtagttaggccaccacttcaagaactctgtagcaccgcctacatacctcgctctgctaatcctgttaccagtggctgctgccagtggcgataagtcgtgtcttaccgggttggactcaagacgatagttaccggataaggcgcagcggtcgggctgaacggggggttcgtgcacacagcccagcttggagcgaacgacctacaccgaactgagatacctacagcgtgagctatgagaaagcgccacgcttcccgaagggagaaaggcggacaggtatccggtaagcggcagggtcggaacaggagagcgcacgagggagcttccagggggaaacgcctggtatctttatagtcctgtcgggtttcgccacctctgacttgagcgtcgatttttgtgatgctcgtcaggggggcggagcctatggaaaaacgccagcaacgcggcctttttacggttcctggccttttgctggccttttgctcacatgttctttcctgcgttatcccctgattctgtggataaccgtattaccgcctttgagtgagctgataccgctcgccgcagccgaacgaccgagcgcagcgagtcagtgagcgaggaagcggaagagcgcccaatacgcaaaccgcctctccccgcgcgttggccgattcattaatgcagctggcacgacaggtttcccgactggaaagcgggcagtgagcgcaacgcaattaatgtgagttagctcactcattaggcaccccaggctttacactttatgcttccggctcgtatgttgtgtggaattgtgagcggataacaatttcacacaggaaacagcatatgcaaacaagcattactctgacatccaacgcatccggtacgtttgacggttactattacgaactctggaaggatactggcaatacaacaatgacggtctacactcaaggtcgcttttcctgccagtggtcgaacatcaataacgcgttgtttaggaccgggaagaaatacaaccagaattggcagtctcttggcacaatccggatcacgtactctgcgacttacaacccaaacgggaactcctacttgtgtatctatggctggtctaccaacccattggtcgagttctacatcgttgagtcctgggggaactggagaccgcctggtgccacgtccctgggccaagtgacaatcgatggcgggacctacgacatctataggacgacacgcgtcaaccagccttgcttcgcgcctgggacaagggttattacggcctcgggggacgtggtggagattgatgagatcgtggagcgggctgcggagacggctgtggacggcgggctgagggagggctctacagaggttactgtgggggtcaccaacgtcaggacgctggctgcttgggacggcgatctcacctctaatgacgtggtcgcggtggagaagatcgaggctccgtcacgggccgttcgcgtgaggaccaggtccggcgctgagctggttgtgagcgaggaccacaagttcctcgtggacacggaggatggcccaaggatggtcgaggctagcgagctcaagtcgggggatgagctgtactcggtgcgggagctccgcgtgtctgagaaggtcccaacatacctggagctcctgctggaggccgaggacaagttctacgtgcatcctactgaggagttcgaggaggctgtcgctgagcgctacggctccctggctgaggcttgcagggagaaggagctcccatacagggccagggaggctaaggagcgcaggtactacgagctgagcgagttcgctaggctcgctacggctgttatcgagtcggtggacgaggccacagagtacattgattacgtcactgcgggcgggcggaagcgcgttaagttctccagcccaaggccaggcaaggaggtcatgtatgtggcgggcctgatcgcttcagacgggtccgttgatacagagaggggcttcgtgatgttctcaaacactgagcgggagctgctctccgcgttcgaggagattgtcacagaggagttcggcgttgacgcctcgaagaccgagaaccagaatggggtcacgatgctgagggtcaattcccgggttctcgcgcgcgtgttcgagaggctggctgacccgaagactgtcctcaagatgccccgcgagctcgtggctgcttacctggctggctacgtcgacggcgatgggcacctgaaggatgggaagatcgtgattaccacggctgacagggagagggctggcgatctccagctgctcctgaagaggctgggggtgccaagcgtcctcagggagagggacggcgcttacgatgtcgttgtgacagggcacgacgctgctgagctcgctgaggagctcccactgaggcatcctaagaaggctgaggctgctgcttccatgtcgtctggcaggcgctcatccaggttcgaccgggtgagcaggaggttcgggaggctcctgagggaggtgcgcaggaagtacggcgtcagggcttccgatctggggagctcgtctaccatctctcagattgagtcaggcgagaggagggctacgaggaggctcgctctggagatcgtcgagaggctggaggaggtcgttggcgacgttgaggaggtgcgggagctcagggagctggctgagggcaactacgtgctggatgaggtggtcgaggtcgagacggttgagtacgagcatgagtacctctacgatgttacagtggttccagatcatactctcgtggttgagaatggcatcattacaagcaactccattgtggggacagccacgttcgatcagtactggagcgtgcgcacctctaagcggacttcaggaacagtgaccgtgaccgatcacttccgcgcctgggcgaaccggggcctgaacctcggcacaatagaccaaattacattgtgcgtggagggttaccaaagctctggatcagccaacatcacccagaacaccttctctcagggctcttcttccggcagttcgggtggctcatccggctccacaacgactactcgcatcgagtgtgagaacatgtccttgtccggaccctacgttagcaggatcaccaatccctttaatggtattgcgctgtacgccaacggagacacagcccgcgctaccgttaacttccccgcaagtcgcaactacaatttccgcctgcggggttgcggcaacaacaataatcttgcccgtgtggacctgaggatcgacggacggaccgtcgggaccttttattaccagggcacatacccctgggaggccccaattgacaatgtttatgtcagtgcggggagtcatacagtcgaaatcactgttactgcggataacggcacatgggacgtgtatgccgactacctggtgatacagtgactcgagggggggcccggtacccaattcgccctatagtgagtcgtattacaattcactggccgtcgttttacaacgtcgtgactgggaaaaccctggcgttacccaacttaatcgccttgcagcacatccccctttcgccagctggcgtaatagcgaagaggcccgcaccgatcgcccttcccaacagttgcgcagcctgaatggcgaatggaaattgtaagcgttaatattttgttaaaattcgcgttaaatttttgttaaatcagctcattttttaaccaataggccgaaatcggcaaaatcccttataaatcaaaagaatagaccgagatagggttgagtgttgttccagtttggaacaagagtccactattaaagaacgtggactccaacgtcaaagggcgaaaaaccgtctatcagggcgatggcccactacgtgaaccatcaccctaatcaagttttttggggtcgaggtgccgtaaagcactaaatcggaaccctaaagggagcccccgatttagagcttgacggggaaagccggcgaacgtggcgagaaaggaagggaagaaagcgaaaggagcgggcgctagggcgctggcaagtgtagcggtcacgctgcgcgtaaccaccacacccgccgcgcttaatgcgccgctacagggcgcgtcaggtg

SEQ ID NO: 3068 - DNA, 4781 bp, Artificial Sequence
  Synthetic Construct, AS-68 intein modified protein encoding nucleic acids in pBluescript
gcacttttcggggaaatgtgcgcggaacccctatttgtttatttttctaaatacattcaaatatgtatccgctcatgagacaataaccctgataaatgcttcaataatattgaaaaaggaagagtatgagtattcaacatttccgtgtcgcccttattcccttttttgcggcattttgccttcctgtttttgctcacccagaaacgctggtgaaagtaaaagatgctgaagatcagttgggtgcacgagtgggttacatcgaactggatctcaacagcggtaagatccttgagagttttcgccccgaagaacgttttccaatgatgagcacttttaaagttctgctatgtggcgcggtattatcccgtattgacgccgggcaagagcaactcggtcgccgcatacactattctcagaatgacttggttgagtactcaccagtcacagaaaagcatcttacggatggcatgacagtaagagaattatgcagtgctgccataaccatgagtgataacactgcggccaacttacttctgacaacgatcggaggaccgaaggagctaaccgcttttttgcacaacatgggggatcatgtaactcgccttgatcgttgggaaccggagctgaatgaagccataccaaacgacgagcgtgacaccacgatgcctgtagcaatggcaacaacgttgcgcaaactattaactggcgaactacttactctagcttcccggcaacaattaatagactggatggaggcggataaagttgcaggaccacttctgcgctcggcccttccggctggctggtttattgctgataaatctggagccggtgagcgtgggtctcgcggtatcattgcagcactggggccagatggtaagccctcccgtatcgtagttatctacacgacggggagtcaggcaactatggatgaacgaaatagacagatcgctgagataggtgcctcactgattaagcattggtaactgtcagaccaagtttactcatatatactttagattgatttaaaacttcatttttaatttaaaaggatctaggtgaagatcctttttgataatctcatgaccaaaatcccttaacgtgagttttcgttccactgagcgtcagaccccgtagaaaagatcaaaggatcttcttgagatcctttttttctgcgcgtaatctgctgcttgcaaacaaaaaaaccaccgctaccagcggtggtttgtttgccggatcaagagctaccaactctttttccgaaggtaactggcttcagcagagcgcagataccaaatactgtccttctagtgtagccgtagttaggccaccacttcaagaactctgtagcaccgcctacatacctcgctctgctaatcctgttaccagtggctgctgccagtggcgataagtcgtgtcttaccgggttggactcaagacgatagttaccggataaggcgcagcggtcgggctgaacggggggttcgtgcacacagcccagcttggagcgaacgacctacaccgaactgagatacctacagcgtgagctatgagaaagcgccacgcttcccgaagggagaaaggcggacaggtatccggtaagcggcagggtcggaacaggagagcgcacgagggagcttccagggggaaacgcctggtatctttatagtcctgtcgggtttcgccacctctgacttgagcgtcgatttttgtgatgctcgtcaggggggcggagcctatggaaaaacgccagcaacgcggcctttttacggttcctggccttttgctggccttttgctcacatgttctttcctgcgttatcccctgattctgtggataaccgtattaccgcctttgagtgagctgataccgctcgccgcagccgaacgaccgagcgcagcgagtcagtgagcgaggaagcggaagagcgcccaatacgcaaaccgcctctccccgcgcgttggccgattcattaatgcagctggcacgacaggtttcccgactggaaagcgggcagtgagcgcaacgcaattaatgtgagttagctcactcattaggcaccccaggctttacactttatgcttccggctcgtatgttgtgtggaattgtgagcggataacaatttcacacaggaaacagcatatgcaaacaagcattactctgacatccaacgcatccggtacgtttgacggttactattacgaactctggaaggatactggcaatacaacaatgacggtctacactcaaggtcgcttttcctgccagtggtcgaacatcaataacgcgttgtttaggaccgggaagaaatacaaccagaattggcagtctcttggcacaatccggatcacgtactctgcgacttacaacccaaacgggaactcctacttgtgtatctatggctggtctaccaacccattggtcgagttctacatcgttgagtcctgggggaactggagaccgcctggtgccacgtccctgggccaagtgacaatcgatggcgggacctacgacatctataggacgacacgcgtcaaccagccttgctcgtggacaaacgctagggcggttacaaggcgggggttcgtgcatgtggatgatctcactactgatgatgaggtcatgtcggtcgacgatcagggcaggacaatctggcagcagattgacgaggtggtccggttcccgttcagcggcacgctctactcgctgggcgggagggagatcaacgctaccattacggccaatcaccgggttgtgggcctcaaccgcgagaagaccaagtgggttgagcatacaccaacttccctgcctggcaacaagatgtgggtgtacaccgctggcgaggggagcaatgaggactacccgctcaccgatacggagatcaggctcgctgtgtggggcctgacagactcgcacaggtctcccgatggccggtggactttctaccagtccggggagaaggcggagcaggtcaggaagctcctggctgacgctggcattgagtacagggagagggctaggaacaggggcatcaccgagattgatgggaaggtcctcaaggcgccgcccaagacgcagtacgagttctcgctcggcaaggttcaggagctggacgatctcctggacagggggaggagcgagctgccaacatggactctctccctgagccagaggcaggctaggctcttcctggaggagtacaggttcaccgacggcacggataccacgtcagctggggactcctacgtcctctacgtttgcaaggatcgcatgagggagcagctccagatgctggctgctgctaacggcctcagggcttccacaactgagtacaggccagggcattggaggctgaacatctctaatagggcgctctcaggcctgtacaagaataccgtggaggaggtcgcttacgagggggaagtgtggtgcctgcgggttccaaatggcaggttcttcattgaggatgggggcaagattcatctcacgggcaactccattgtggggacagccacgttcgatcagtactggagcgtgcgcacctctaagcggacttcaggaacagtgaccgtgaccgatcacttccgcgcctgggcgaaccggggcctgaacctcggcacaatagaccaaattacattgtgcgtggagggttaccaaagctctggatcagccaacatcacccagaacaccttctctcagggctcttcttccggcagttcgggtggctcatccggctccacaacgactactcgcatcgagtgtgagaacatgtccttgtccggaccctacgttagcaggatcaccaatccctttaatggtattgcgctgtacgccaacggagacacagcccgcgctaccgttaacttccccgcaagtcgcaactacaatttccgcctgcggggttgcggcaacaacaataatcttgcccgtgtggacctgaggatcgacggacggaccgtcgggaccttttattaccagggcacatacccctgggaggccccaattgacaatgtttatgtcagtgcggggagtcatacagtcgaaatcactgttactgcggataacggcacatgggacgtgtatgccgactacctggtgatacagtgactcgagggggggcccggtacccaattcgccctatagtgagtcgtattacaattcactggccgtcgttttacaacgtcgtgactgggaaaaccctggcgttacccaacttaatcgccttgcagcacatccccctttcgccagctggcgtaatagcgaagaggcccgcaccgatcgcccttcccaacagttgcgcagcctgaatggcgaatggaaattgtaagcgttaatattttgttaaaattcgcgttaaatttttgttaaatcagctcattttttaaccaataggccgaaatcggcaaaatcccttataaatcaaaagaatagaccgagatagggttgagtgttgttccagtttggaacaagagtccactattaaagaacgtggactccaacgtcaaagggcgaaaaaccgtctatcagggcgatggcccactacgtgaaccatcaccctaatcaagttttttggggtcgaggtgccgtaaagcactaaatcggaaccctaaagggagcccccgatttagagcttgacggggaaagccggcgaacgtggcgagaaaggaagggaagaaagcgaaaggagcgggcgctagggcgctggcaagtgtagcggtcacgctgcgcgtaaccaccacacccgccgcgcttaatgcgccgctacagggcgcgtcaggtg

SEQ ID NO: 3069 - DNA, 4823 bp, Artificial Sequence
  Synthetic Construct, AS-69 intein modified protein encoding nucleic acids in pBluescript
gcacttttcggggaaatgtgcgcggaacccctatttgtttatttttctaaatacattcaaatatgtatccgctcatgagacaataaccctgataaatgcttcaataatattgaaaaaggaagagtatgagtattcaacatttccgtgtcgcccttattcccttttttgcggcattttgccttcctgtttttgctcacccagaaacgctggtgaaagtaaaagatgctgaagatcagttgggtgcacgagtgggttacatcgaactggatctcaacagcggtaagatccttgagagttttcgccccgaagaacgttttccaatgatgagcacttttaaagttctgctatgtggcgcggtattatcccgtattgacgccgggcaagagcaactcggtcgccgcatacactattctcagaatgacttggttgagtactcaccagtcacagaaaagcatcttacggatggcatgacagtaagagaattatgcagtgctgccataaccatgagtgataacactgcggccaacttacttctgacaacgatcggaggaccgaaggagctaaccgcttttttgcacaacatgggggatcatgtaactcgccttgatcgttgggaaccggagctgaatgaagccataccaaacgacgagcgtgacaccacgatgcctgtagcaatggcaacaacgttgcgcaaactattaactggcgaactacttactctagcttcccggcaacaattaatagactggatggaggcggataaagttgcaggaccacttctgcgctcggcccttccggctggctggtttattgctgataaatctggagccggtgagcgtgggtctcgcggtatcattgcagcactggggccagatggtaagccctcccgtatcgtagttatctacacgacggggagtcaggcaactatggatgaacgaaatagacagatcgctgagataggtgcctcactgattaagcattggtaactgtcagaccaagtttactcatatatactttagattgatttaaaacttcatttttaatttaaaaggatctaggtgaagatcctttttgataatctcatgaccaaaatcccttaacgtgagttttcgttccactgagcgtcagaccccgtagaaaagatcaaaggatcttcttgagatcctttttttctgcgcgtaatctgctgcttgcaaacaaaaaaaccaccgctaccagcggtggtttgtttgccggatcaagagctaccaactctttttccgaaggtaactggcttcagcagagcgcagataccaaatactgtccttctagtgtagccgtagttaggccaccacttcaagaactctgtagcaccgcctacatacctcgctctgctaatcctgttaccagtggctgctgccagtggcgataagtcgtgtcttaccgggttggactcaagacgatagttaccggataaggcgcagcggtcgggctgaacggggggttcgtgcacacagcccagcttggagcgaacgacctacaccgaactgagatacctacagcgtgagctatgagaaagcgccacgcttcccgaagggagaaaggcggacaggtatccggtaagcggcagggtcggaacaggagagcgcacgagggagcttccagggggaaacgcctggtatctttatagtcctgtcgggtttcgccacctctgacttgagcgtcgatttttgtgatgctcgtcaggggggcggagcctatggaaaaacgccagcaacgcggcctttttacggttcctggccttttgctggccttttgctcacatgttctttcctgcgttatcccctgattctgtggataaccgtattaccgcctttgagtgagctgataccgctcgccgcagccgaacgaccgagcgcagcgagtcagtgagcgaggaagcggaagagcgcccaatacgcaaaccgcctctccccgcgcgttggccgattcattaatgcagctggcacgacaggtttcccgactggaaagcgggcagtgagcgcaacgcaattaatgtgagttagctcactcattaggcaccccaggctttacactttatgcttccggctcgtatgttgtgtggaattgtgagcggataacaatttcacacaggaaacagcatatgcaaacaagcattactctgacatccaacgcatccggtacgtttgacggttactattacgaactctggaaggatactggcaatacaacaatgacggtctacactcaaggtcgcttttcctgccagtggtcgaacatcaataacgcgttgtttaggaccgggaagaaatacaaccagaattggcagtctcttggcacaatccggatcacgtactctgcgacttacaacccaaacgggaactcctacttgtgtatctatggctggtctaccaacccattggtcgagttctacatcgttgagtcctgggggaactggagaccgcctggtgccacgtccctgggccaagtgacaatcgatggcgggacctacgacatctataggacgacacgcgtcaaccagccttcgctcgcctgctctactcctattctgactacaaatgggtggtcaactatgggggctctccaggacggggatgaggtctacgcgcctgacggccagcctaccaaggtcatcaaggcccaccccattaacctcaataggccatgcttcaaggtccggttccgcgacggccaggaggtggtcacggatgcggagcatctgtggcaggtgaacgaccggaacaatggcgggagggatcgggtcatgaccacgcaggagatcgctgacgctccatggggcgggcgctacaggttccgggtcccagttaccgagcctctccagacgccagaggctgacctgccagtggatccatggctcctgggcgcttggctcggcgacggggatgcctcgatggtctctatctgctccggcagccaggacctcgattacctgatttctagggtcgagggcctcgggctgtcacacagggttaaccgctacggctcacgcgccgcttccgtctacgtgcatggcatgagggctgtgttctcggagctcgggctcctgaagaataagcacatccccgacaggtacctgaccgcttctgtcgctcagaggaggcagctcctggctggcctgatggacagcgatgggacagtttcggatcgccaagtgactattagcatgaagaacgagaggctcatgaggcaggtgctccagctggtccggtccctgggctacagggctggcttcgggagccgcatggctaggctcaatggcagggactgcgggctggtctacgtggtgcgcttccatacaggctggggggagtcgcccttcgacatgccacgcaagagggatggctgggagcaggcgacaaagacttccgttcagaacctccggctgaatgccatcgttgcggtggagcctgtcgagaccgtcccggttcgctgcattactgttgctcatgagtcttcgctctacgttgctggggaggggttcgttcctacacataattccattgtggggacagccacgttcgatcagtactggagcgtgcgcacctctaagcggacttcaggaacagtgaccgtgaccgatcacttccgcgcctgggcgaaccggggcctgaacctcggcacaatagaccaaattacattgtgcgtggagggttaccaaagctctggatcagccaacatcacccagaacaccttctctcagggctcttcttccggcagttcgggtggctcatccggctccacaacgactactcgcatcgagtgtgagaacatgtccttgtccggaccctacgttagcaggatcaccaatccctttaatggtattgcgctgtacgccaacggagacacagcccgcgctaccgttaacttccccgcaagtcgcaactacaatttccgcctgcggggttgcggcaacaacaataatcttgcccgtgtggacctgaggatcgacggacggaccgtcgggaccttttattaccagggcacatacccctgggaggccccaattgacaatgtttatgtcagtgcggggagtcatacagtcgaaatcactgttactgcggataacggcacatgggacgtgtatgccgactacctggtgatacagtgactcgagggggggcccggtacccaattcgccctatagtgagtcgtattacaattcactggccgtcgttttacaacgtcgtgactgggaaaaccctggcgttacccaacttaatcgccttgcagcacatccccctttcgccagctggcgtaatagcgaagaggcccgcaccgatcgcccttcccaacagttgcgcagcctgaatggcgaatggaaattgtaagcgttaatattttgttaaaattcgcgttaaatttttgttaaatcagctcattttttaaccaataggccgaaatcggcaaaatcccttataaatcaaaagaatagaccgagatagggttgagtgttgttccagtttggaacaagagtccactattaaagaacgtggactccaacgtcaaagggcgaaaaaccgtctatcagggcgatggcccactacgtgaaccatcaccctaatcaagttttttggggtcgaggtgccgtaaagcactaaatcggaaccctaaagggagcccccgatttagagcttgacggggaaagccggcgaacgtggcgagaaaggaagggaagaaagcgaaaggagcgggcgctagggcgctggcaagtgtagcggtcacgctgcgcgtaaccaccacacccgccgcgcttaatgcgccgctacagggcgcgtcaggtg

SEQ ID NO: 3070 - DNA, 5138 bp, Artificial Sequence
  Synthetic Construct, AS-70 intein modified protein encoding nucleic acids in pBluescript
gcacttttcggggaaatgtgcgcggaacccctatttgtttatttttctaaatacattcaaatatgtatccgctcatgagacaataaccctgataaatgcttcaataatattgaaaaaggaagagtatgagtattcaacatttccgtgtcgcccttattcccttttttgcggcattttgccttcctgtttttgctcacccagaaacgctggtgaaagtaaaagatgctgaagatcagttgggtgcacgagtgggttacatcgaactggatctcaacagcggtaagatccttgagagttttcgccccgaagaacgttttccaatgatgagcacttttaaagttctgctatgtggcgcggtattatcccgtattgacgccgggcaagagcaactcggtcgccgcatacactattctcagaatgacttggttgagtactcaccagtcacagaaaagcatcttacggatggcatgacagtaagagaattatgcagtgctgccataaccatgagtgataacactgcggccaacttacttctgacaacgatcggaggaccgaaggagctaaccgcttttttgcacaacatgggggatcatgtaactcgccttgatcgttgggaaccggagctgaatgaagccataccaaacgacgagcgtgacaccacgatgcctgtagcaatggcaacaacgttgcgcaaactattaactggcgaactacttactctagcttcccggcaacaattaatagactggatggaggcggataaagttgcaggaccacttctgcgctcggcccttccggctggctggtttattgctgataaatctggagccggtgagcgtgggtctcgcggtatcattgcagcactggggccagatggtaagccctcccgtatcgtagttatctacacgacggggagtcaggcaactatggatgaacgaaatagacagatcgctgagataggtgcctcactgattaagcattggtaactgtcagaccaagtttactcatatatactttagattgatttaaaacttcatttttaatttaaaaggatctaggtgaagatcctttttgataatctcatgaccaaaatcccttaacgtgagttttcgttccactgagcgtcagaccccgtagaaaagatcaaaggatcttcttgagatcctttttttctgcgcgtaatctgctgcttgcaaacaaaaaaaccaccgctaccagcggtggtttgtttgccggatcaagagctaccaactctttttccgaaggtaactggcttcagcagagcgcagataccaaatactgtccttctagtgtagccgtagttaggccaccacttcaagaactctgtagcaccgcctacatacctcgctctgctaatcctgttaccagtggctgctgccagtggcgataagtcgtgtcttaccgggttggactcaagacgatagttaccggataaggcgcagcggtcgggctgaacggggggttcgtgcacacagcccagcttggagcgaacgacctacaccgaactgagatacctacagcgtgagctatgagaaagcgccacgcttcccgaagggagaaaggcggacaggtatccggtaagcggcagggtcggaacaggagagcgcacgagggagcttccagggggaaacgcctggtatctttatagtcctgtcgggtttcgccacctctgacttgagcgtcgatttttgtgatgctcgtcaggggggcggagcctatggaaaaacgccagcaacgcggcctttttacggttcctggccttttgctggccttttgctcacatgttctttcctgcgttatcccctgattctgtggataaccgtattaccgcctttgagtgagctgataccgctcgccgcagccgaacgaccgagcgcagcgagtcagtgagcgaggaagcggaagagcgcccaatacgcaaaccgcctctccccgcgcgttggccgattcattaatgcagctggcacgacaggtttcccgactggaaagcgggcagtgagcgcaacgcaattaatgtgagttagctcactcattaggcaccccaggctttacactttatgcttccggctcgtatgttgtgtggaattgtgagcggataacaatttcacacaggaaacagcatatgcaaacaagcattactctgacatccaacgcatccggtacgtttgacggttactattacgaactctggaaggatactggcaatacaacaatgacggtctacactcaaggtcgcttttcctgccagtggtcgaacatcaataacgcgttgtttaggaccgggaagaaatacaaccagaattggcagtctcttggcacaatccggatcacgtactctgcgacttacaacccaaacgggaactcctacttgtgtatctatggctggtctaccaacccattggtcgagttctacatcgttgagtcctgggggaactggagaccgcctggtgccacgtccctgggccaagtgacaatcgatggcgggacctacgacatctataggacgacacgcgtcaaccagccttgcgttaagaatgattcgctgattttcactgatcgggggctggtcactgcggcggagctcgctgtcggggttcctgaggagcatgcggccttcacggaggttggcgtggacacatccactgggagggcgaccacgaacgctgtgtacaatggcgggaggagcccaaccaagagggctaggctcgccctgggctacgagctggaggcgacgccagagcacccaatcagggttctcagggacgatgcgctggcttgggtgcggatggacgagctccatgtcggcgatcgcgttgctctgaggaggggctcggaagtgtgggggcgctccagcctgccagaggcgttcaggtgggtcaagcctaagtacgccgcgaacctcaagctgccaaagggcctcgtgctggacgaggtcgctgctgaggcttgcggcctcctggtctccgaggggaccctcacgaagcgcctggttacagagttcactaacgccgacgcggataatgtgggcttcatctcgcgctgggcggcttctatcggcattgacctctcaaggaacgggagcgattcgattcagtacctcctgtgctccgtggtcctcagggagtggctggcttggctcggcctggactacaccagggccgctgggaagtgcatcccgcgggcggtccgcttcggcgggagggacattatgagggcgttcctcaggggcctgttcgacggggatgcttctgtcgatcccctcaagggcgttatcgagttctgcacagcctcagagaggatggcgcgggaggtccaggttgctctcctgggcctcgggattctggcttctcgccactcaaggactgtggccggctacgagcagctgtactggcgggtgaccgtcaacgacgtggccacgttcgagagggaggtcggcttctcgtctaactggaataggctcaggctgagggaggctgtggcgcgggcagagggcaggtgccggaacccgaatgttgatacagtgcccatcaacgggctcgtcgagaggctgtacaggactgcccagaagcagctctcctggtcatcccaggagggccgcatcttcgggaattacgtgcacggcgagcatgctccaagcagggctgctctggagaggatggtccagcgctgggggtcggagtgcccaaccgagtgcctccctatcgaggccttcctggagctgcctgttgccttcctgtccgtggagagcattgaggacggcgaggcggatgtcgtggatctctcagttccagagacgcatgagttcgttgctaatggggtcgtttgccataattccattgtggggacagccacgttcgatcagtactggagcgtgcgcacctctaagcggacttcaggaacagtgaccgtgaccgatcacttccgcgcctgggcgaaccggggcctgaacctcggcacaatagaccaaattacattgtgcgtggagggttaccaaagctctggatcagccaacatcacccagaacaccttctctcagggctcttcttccggcagttcgggtggctcatccggctccacaacgactactcgcatcgagtgtgagaacatgtccttgtccggaccctacgttagcaggatcaccaatccctttaatggtattgcgctgtacgccaacggagacacagcccgcgctaccgttaacttccccgcaagtcgcaactacaatttccgcctgcggggttgcggcaacaacaataatcttgcccgtgtggacctgaggatcgacggacggaccgtcgggaccttttattaccagggcacatacccctgggaggccccaattgacaatgtttatgtcagtgcggggagtcatacagtcgaaatcactgttactgcggataacggcacatgggacgtgtatgccgactacctggtgatacagtgactcgagggggggcccggtacccaattcgccctatagtgagtcgtattacaattcactggccgtcgttttacaacgtcgtgactgggaaaaccctggcgttacccaacttaatcgccttgcagcacatccccctttcgccagctggcgtaatagcgaagaggcccgcaccgatcgcccttcccaacagttgcgcagcctgaatggcgaatggaaattgtaagcgttaatattttgttaaaattcgcgttaaatttttgttaaatcagctcattttttaaccaataggccgaaatcggcaaaatcccttataaatcaaaagaatagaccgagatagggttgagtgttgttccagtttggaacaagagtccactattaaagaacgtggactccaacgtcaaagggcgaaaaaccgtctatcagggcgatggcccactacgtgaaccatcaccctaatcaagttttttggggtcgaggtgccgtaaagcactaaatcggaaccctaaagggagcccccgatttagagcttgacggggaaagccggcgaacgtggcgagaaaggaagggaagaaagcgaaaggagcgggcgctagggcgctggcaagtgtagcggtcacgctgcgcgtaaccaccacacccgccgcgcttaatgcgccgctacagggcgcgtcaggtg

SEQ ID NO: 3071 - DNA, 5105 bp, Artificial Sequence
  Synthetic Construct, AS-71 intein modified protein encoding nucleic acids in pBluescript
gcacttttcggggaaatgtgcgcggaacccctatttgtttatttttctaaatacattcaaatatgtatccgctcatgagacaataaccctgataaatgcttcaataatattgaaaaaggaagagtatgagtattcaacatttccgtgtcgcccttattcccttttttgcggcattttgccttcctgtttttgctcacccagaaacgctggtgaaagtaaaagatgctgaagatcagttgggtgcacgagtgggttacatcgaactggatctcaacagcggtaagatccttgagagttttcgccccgaagaacgttttccaatgatgagcacttttaaagttctgctatgtggcgcggtattatcccgtattgacgccgggcaagagcaactcggtcgccgcatacactattctcagaatgacttggttgagtactcaccagtcacagaaaagcatcttacggatggcatgacagtaagagaattatgcagtgctgccataaccatgagtgataacactgcggccaacttacttctgacaacgatcggaggaccgaaggagctaaccgcttttttgcacaacatgggggatcatgtaactcgccttgatcgttgggaaccggagctgaatgaagccataccaaacgacgagcgtgacaccacgatgcctgtagcaatggcaacaacgttgcgcaaactattaactggcgaactacttactctagcttcccggcaacaattaatagactggatggaggcggataaagttgcaggaccacttctgcgctcggcccttccggctggctggtttattgctgataaatctggagccggtgagcgtgggtctcgcggtatcattgcagcactggggccagatggtaagccctcccgtatcgtagttatctacacgacggggagtcaggcaactatggatgaacgaaatagacagatcgctgagataggtgcctcactgattaagcattggtaactgtcagaccaagtttactcatatatactttagattgatttaaaacttcatttttaatttaaaaggatctaggtgaagatcctttttgataatctcatgaccaaaatcccttaacgtgagttttcgttccactgagcgtcagaccccgtagaaaagatcaaaggatcttcttgagatcctttttttctgcgcgtaatctgctgcttgcaaacaaaaaaaccaccgctaccagcggtggtttgtttgccggatcaagagctaccaactctttttccgaaggtaactggcttcagcagagcgcagataccaaatactgtccttctagtgtagccgtagttaggccaccacttcaagaactctgtagcaccgcctacatacctcgctctgctaatcctgttaccagtggctgctgccagtggcgataagtcgtgtcttaccgggttggactcaagacgatagttaccggataaggcgcagcggtcgggctgaacggggggttcgtgcacacagcccagcttggagcgaacgacctacaccgaactgagatacctacagcgtgagctatgagaaagcgccacgcttcccgaagggagaaaggcggacaggtatccggtaagcggcagggtcggaacaggagagcgcacgagggagcttccagggggaaacgcctggtatctttatagtcctgtcgggtttcgccacctctgacttgagcgtcgatttttgtgatgctcgtcaggggggcggagcctatggaaaaacgccagcaacgcggcctttttacggttcctggccttttgctggccttttgctcacatgttctttcctgcgttatcccctgattctgtggataaccgtattaccgcctttgagtgagctgataccgctcgccgcagccgaacgaccgagcgcagcgagtcagtgagcgaggaagcggaagagcgcccaatacgcaaaccgcctctccccgcgcgttggccgattcattaatgcagctggcacgacaggtttcccgactggaaagcgggcagtgagcgcaacgcaattaatgtgagttagctcactcattaggcaccccaggctttacactttatgcttccggctcgtatgttgtgtggaattgtgagcggataacaatttcacacaggaaacagcatatgcaaacaagcattactctgacatccaacgcatccggtacgtttgacggttactattacgaactctggaaggatactggcaatacaacaatgacggtctacactcaaggtcgcttttcctgccagtggtcgaacatcaataacgcgttgtttaggaccgggaagaaatacaaccagaattggcagtctcttggcacaatccggatcacgtactctgcgacttacaacccaaacgggaactcctacttgtgtatctatggctggtctaccaacccattggtcgagttctacatcgttgagtcctgggggaactggagaccgcctggtgccacgtccctgggccaagtgacaatcgatggcgggacctacgacatctataggacgacacgcgtcaaccagccttgcctcccagcctcaacgcggattctcagggcggacactggcgcggagtcaactctcggggagctgctggcctcgggggagcagcctctcgtttggtccctggacgagaggatgaggatggtcgctaggccgatggttaaggtgttcccctcgggcaggaaggaggtgttcaggctgaggctcgcttctgggagggaggtcgaggctaccggcaaccacccgttcctcacggtggacgggtggatcccactggataggctcacagtcggcgacaggctggctactccaaggagcgtgccagagcccgtccacacagagaggatggccgatgcggaggtggtcctcctggctcacatgatcggcgacgggtcgtgcgtccgcaggcagcccgttcgctacgcctccattgacgagcagaatctcgctgcggtgagcgaggctgctgagcatttcggcgtgacggcggtcagggacgattacgctgctgcccgcgtcaccacgctgaggctcccagctccttacaggctgtcacgcggcaagaggaacccaattgcggcttggctcgatgagctgggcctcttcgggctgaggtcccacgagaagttcatcccacggcgcgtcttcgctctccctaatgaccaggttgccctgttcctccgccatctgtgggccacagatggctccgtgaggtgggacagcacttacaggcaggcgcgcgtctactacacatccactagcaggcggctcatcgacgatgtggcgcagctcctgctcaggctgggcgttcacgggcgcattcgcagggtgaccaagccagggtacagggacgcttggcatctcaccatcgacggcgctgataaccagacggtgttcctgagggatgtcggcgttcacggggcccggggcgacgctgctcaggtggctctggctgagctggagccactggtccggaacaccaatgttgacacggtgcctaacgaggtttggaatcaggtgcgccacctgctcgcgacaaagaacattactcatcgcgagttctcggctgccatggggtctaggttctgcggctcaaccatgtggaagaggtcgccctctcgctcaaggctcgcccgcgtcgctgctgttctggacgatgcggatatcgagatgtacgctaccaatgacgtgttctgggataagatcgtcgagattacgtctctcggcgagcaggacgtgtacgatggcactgttccaggcactcataacttcgttgctcagtctatctctgttcataattccattgtggggacagccacgttcgatcagtactggagcgtgcgcacctctaagcggacttcaggaacagtgaccgtgaccgatcacttccgcgcctgggcgaaccggggcctgaacctcggcacaatagaccaaattacattgtgcgtggagggttaccaaagctctggatcagccaacatcacccagaacaccttctctcagggctcttcttccggcagttcgggtggctcatccggctccacaacgactactcgcatcgagtgtgagaacatgtccttgtccggaccctacgttagcaggatcaccaatccctttaatggtattgcgctgtacgccaacggagacacagcccgcgctaccgttaacttccccgcaagtcgcaactacaatttccgcctgcggggttgcggcaacaacaataatcttgcccgtgtggacctgaggatcgacggacggaccgtcgggaccttttattaccagggcacatacccctgggaggccccaattgacaatgtttatgtcagtgcggggagtcatacagtcgaaatcactgttactgcggataacggcacatgggacgtgtatgccgactacctggtgatacagtgactcgagggggggcccggtacccaattcgccctatagtgagtcgtattacaattcactggccgtcgttttacaacgtcgtgactgggaaaaccctggcgttacccaacttaatcgccttgcagcacatccccctttcgccagctggcgtaatagcgaagaggcccgcaccgatcgcccttcccaacagttgcgcagcctgaatggcgaatggaaattgtaagcgttaatattttgttaaaattcgcgttaaatttttgttaaatcagctcattttttaaccaataggccgaaatcggcaaaatcccttataaatcaaaagaatagaccgagatagggttgagtgttgttccagtttggaacaagagtccactattaaagaacgtggactccaacgtcaaagggcgaaaaaccgtctatcagggcgatggcccactacgtgaaccatcaccctaatcaagttttttggggtcgaggtgccgtaaagcactaaatcggaaccctaaagggagcccccgatttagagcttgacggggaaagccggcgaacgtggcgagaaaggaagggaagaaagcgaaaggagcgggcgctagggcgctggcaagtgtagcggtcacgctgcgcgtaaccaccacacccgccgcgcttaatgcgccgctacagggcgcgtcaggtg

SEQ ID NO: 3072 - DNA, 4769 bp, Artificial Sequence
  Synthetic Construct, AS-72 intein modified protein encoding nucleic acids in pBluescript
gcacttttcggggaaatgtgcgcggaacccctatttgtttatttttctaaatacattcaaatatgtatccgctcatgagacaataaccctgataaatgcttcaataatattgaaaaaggaagagtatgagtattcaacatttccgtgtcgcccttattcccttttttgcggcattttgccttcctgtttttgctcacccagaaacgctggtgaaagtaaaagatgctgaagatcagttgggtgcacgagtgggttacatcgaactggatctcaacagcggtaagatccttgagagttttcgccccgaagaacgttttccaatgatgagcacttttaaagttctgctatgtggcgcggtattatcccgtattgacgccgggcaagagcaactcggtcgccgcatacactattctcagaatgacttggttgagtactcaccagtcacagaaaagcatcttacggatggcatgacagtaagagaattatgcagtgctgccataaccatgagtgataacactgcggccaacttacttctgacaacgatcggaggaccgaaggagctaaccgcttttttgcacaacatgggggatcatgtaactcgccttgatcgttgggaaccggagctgaatgaagccataccaaacgacgagcgtgacaccacgatgcctgtagcaatggcaacaacgttgcgcaaactattaactggcgaactacttactctagcttcccggcaacaattaatagactggatggaggcggataaagttgcaggaccacttctgcgctcggcccttccggctggctggtttattgctgataaatctggagccggtgagcgtgggtctcgcggtatcattgcagcactggggccagatggtaagccctcccgtatcgtagttatctacacgacggggagtcaggcaactatggatgaacgaaatagacagatcgctgagataggtgcctcactgattaagcattggtaactgtcagaccaagtttactcatatatactttagattgatttaaaacttcatttttaatttaaaaggatctaggtgaagatcctttttgataatctcatgaccaaaatcccttaacgtgagttttcgttccactgagcgtcagaccccgtagaaaagatcaaaggatcttcttgagatcctttttttctgcgcgtaatctgctgcttgcaaacaaaaaaaccaccgctaccagcggtggtttgtttgccggatcaagagctaccaactctttttccgaaggtaactggcttcagcagagcgcagataccaaatactgtccttctagtgtagccgtagttaggccaccacttcaagaactctgtagcaccgcctacatacctcgctctgctaatcctgttaccagtggctgctgccagtggcgataagtcgtgtcttaccgggttggactcaagacgatagttaccggataaggcgcagcggtcgggctgaacggggggttcgtgcacacagcccagcttggagcgaacgacctacaccgaactgagatacctacagcgtgagctatgagaaagcgccacgcttcccgaagggagaaaggcggacaggtatccggtaagcggcagggtcggaacaggagagcgcacgagggagcttccagggggaaacgcctggtatctttatagtcctgtcgggtttcgccacctctgacttgagcgtcgatttttgtgatgctcgtcaggggggcggagcctatggaaaaacgccagcaacgcggcctttttacggttcctggccttttgctggccttttgctcacatgttctttcctgcgttatcccctgattctgtggataaccgtattaccgcctttgagtgagctgataccgctcgccgcagccgaacgaccgagcgcagcgagtcagtgagcgaggaagcggaagagcgcccaatacgcaaaccgcctctccccgcgcgttggccgattcattaatgcagctggcacgacaggtttcccgactggaaagcgggcagtgagcgcaacgcaattaatgtgagttagctcactcattaggcaccccaggctttacactttatgcttccggctcgtatgttgtgtggaattgtgagcggataacaatttcacacaggaaacagcatatgcaaacaagcattactctgacatccaacgcatccggtacgtttgacggttactattacgaactctggaaggatactggcaatacaacaatgacggtctacactcaaggtcgcttttcctgccagtggtcgaacatcaataacgcgttgtttaggaccgggaagaaatacaaccagaattggcagtctcttggcacaatccggatcacgtactctgcgacttacaacccaaacgggaactcctacttgtgtatctatggctggtctaccaacccattggtcgagttctacatcgttgagtcctgggggaactggagaccgcctggtgccacgtccctgggccaagtgacaatcgatggcgggacctacgacatctataggacgacacgcgtcaaccagccttgcttccctgcgggcacagtcgtttcggggccatcggcggaggcggctacaaggcgctggttcgagggggagctggtcgttttcactaccgctagcgggaagcagctctcgctgaccggcaaccacccagtgctcacgcgcggcgggtgggtccccgccaacctcctgaatgagggcgacgaggtggtcaggtcgacaaggccacagggcgctactccactcgttgtgcctgaccaccatcaggtgccggcgctgatcgaggatgtctgggggagcttcgctgttaatggcctccacagggtgccagctgctcctgaggacttccatggggatggccagaggggggaggtcgacatcgttggcccagatcggaccctgtggtgcggccacgacgctgctattgctcagcagcgggagcagcagttcttcacccgcaggacggagtccagcggcctcctggtggctgagtccgtcgctcagctcgttgacctgtggcaggctccacactctggctcgtctatcgggcgctcaggcctcccattcgctctgattggcgggcatggcgggggccctgtcgagaggggcctcacggttgctgctgggggctacccaggcctccatgaggccctggcggactaccggcccggcgatgctgtgctgccaccacagggggtcttcgctggctcatccgagatcgggggcgacgattgcgtgattggcaaggtcgactccacacgctgggatgctccagctctccccttcctggtggaggggagggcgggctacgctagcagggggaaggagctcttcgaccggctgactggccaggtcgagctcgatcgcatcgttattctgcggcgcgtgcagtggtccggccacgtcttctcgctcacaagctcagaggggtggcatacgggcaactcgctcatcgtctctaattccattgtggggacagccacgttcgatcagtactggagcgtgcgcacctctaagcggacttcaggaacagtgaccgtgaccgatcacttccgcgcctgggcgaaccggggcctgaacctcggcacaatagaccaaattacattgtgcgtggagggttaccaaagctctggatcagccaacatcacccagaacaccttctctcagggctcttcttccggcagttcgggtggctcatccggctccacaacgactactcgcatcgagtgtgagaacatgtccttgtccggaccctacgttagcaggatcaccaatccctttaatggtattgcgctgtacgccaacggagacacagcccgcgctaccgttaacttccccgcaagtcgcaactacaatttccgcctgcggggttgcggcaacaacaataatcttgcccgtgtggacctgaggatcgacggacggaccgtcgggaccttttattaccagggcacatacccctgggaggccccaattgacaatgtttatgtcagtgcggggagtcatacagtcgaaatcactgttactgcggataacggcacatgggacgtgtatgccgactacctggtgatacagtgactcgagggggggcccggtacccaattcgccctatagtgagtcgtattacaattcactggccgtcgttttacaacgtcgtgactgggaaaaccctggcgttacccaacttaatcgccttgcagcacatccccctttcgccagctggcgtaatagcgaagaggcccgcaccgatcgcccttcccaacagttgcgcagcctgaatggcgaatggaaattgtaagcgttaatattttgttaaaattcgcgttaaatttttgttaaatcagctcattttttaaccaataggccgaaatcggcaaaatcccttataaatcaaaagaatagaccgagatagggttgagtgttgttccagtttggaacaagagtccactattaaagaacgtggactccaacgtcaaagggcgaaaaaccgtctatcagggcgatggcccactacgtgaaccatcaccctaatcaagttttttggggtcgaggtgccgtaaagcactaaatcggaaccctaaagggagcccccgatttagagcttgacggggaaagccggcgaacgtggcgagaaaggaagggaagaaagcgaaaggagcgggcgctagggcgctggcaagtgtagcggtcacgctgcgcgtaaccaccacacccgccgcgcttaatgcgccgctacagggcgcgtcaggtg

SEQ ID NO: 3073 - DNA, 5057 bp, Artificial Sequence
  Synthetic Construct, AS-73 intein modified protein encoding nucleic acids in pBluescript
gcacttttcggggaaatgtgcgcggaacccctatttgtttatttttctaaatacattcaaatatgtatccgctcatgagacaataaccctgataaatgcttcaataatattgaaaaaggaagagtatgagtattcaacatttccgtgtcgcccttattcccttttttgcggcattttgccttcctgtttttgctcacccagaaacgctggtgaaagtaaaagatgctgaagatcagttgggtgcacgagtgggttacatcgaactggatctcaacagcggtaagatccttgagagttttcgccccgaagaacgttttccaatgatgagcacttttaaagttctgctatgtggcgcggtattatcccgtattgacgccgggcaagagcaactcggtcgccgcatacactattctcagaatgacttggttgagtactcaccagtcacagaaaagcatcttacggatggcatgacagtaagagaattatgcagtgctgccataaccatgagtgataacactgcggccaacttacttctgacaacgatcggaggaccgaaggagctaaccgcttttttgcacaacatgggggatcatgtaactcgccttgatcgttgggaaccggagctgaatgaagccataccaaacgacgagcgtgacaccacgatgcctgtagcaatggcaacaacgttgcgcaaactattaactggcgaactacttactctagcttcccggcaacaattaatagactggatggaggcggataaagttgcaggaccacttctgcgctcggcccttccggctggctggtttattgctgataaatctggagccggtgagcgtgggtctcgcggtatcattgcagcactggggccagatggtaagccctcccgtatcgtagttatctacacgacggggagtcaggcaactatggatgaacgaaatagacagatcgctgagataggtgcctcactgattaagcattggtaactgtcagaccaagtttactcatatatactttagattgatttaaaacttcatttttaatttaaaaggatctaggtgaagatcctttttgataatctcatgaccaaaatcccttaacgtgagttttcgttccactgagcgtcagaccccgtagaaaagatcaaaggatcttcttgagatcctttttttctgcgcgtaatctgctgcttgcaaacaaaaaaaccaccgctaccagcggtggtttgtttgccggatcaagagctaccaactctttttccgaaggtaactggcttcagcagagcgcagataccaaatactgtccttctagtgtagccgtagttaggccaccacttcaagaactctgtagcaccgcctacatacctcgctctgctaatcctgttaccagtggctgctgccagtggcgataagtcgtgtcttaccgggttggactcaagacgatagttaccggataaggcgcagcggtcgggctgaacggggggttcgtgcacacagcccagcttggagcgaacgacctacaccgaactgagatacctacagcgtgagctatgagaaagcgccacgcttcccgaagggagaaaggcggacaggtatccggtaagcggcagggtcggaacaggagagcgcacgagggagcttccagggggaaacgcctggtatctttatagtcctgtcgggtttcgccacctctgacttgagcgtcgatttttgtgatgctcgtcaggggggcggagcctatggaaaaacgccagcaacgcggcctttttacggttcctggccttttgctggccttttgctcacatgttctttcctgcgttatcccctgattctgtggataaccgtattaccgcctttgagtgagctgataccgctcgccgcagccgaacgaccgagcgcagcgagtcagtgagcgaggaagcggaagagcgcccaatacgcaaaccgcctctccccgcgcgttggccgattcattaatgcagctggcacgacaggtttcccgactggaaagcgggcagtgagcgcaacgcaattaatgtgagttagctcactcattaggcaccccaggctttacactttatgcttccggctcgtatgttgtgtggaattgtgagcggataacaatttcacacaggaaacagcatatgcaaacaagcattactctgacatccaacgcatccggtacgtttgacggttactattacgaactctggaaggatactggcaatacaacaatgacggtctacactcaaggtcgcttttcctgccagtggtcgaacatcaataacgcgttgtttaggaccgggaagaaatacaaccagaattggcagtctcttggcacaatccggatcacgtactctgcgacttacaacccaaacgggaactcctacttgtgtatctatggctggtctaccaacccattggtcgagttctacatcgttgagtcctgggggaactggagaccgcctggtgccacgtccctgggccaagtgacaatcgatggcgggacctacgacatctataggacgacacgcgtcaaccagccttgcttccctgcgggcacaccagtggacactatcgatgggccaaagcctattgagtcgctgcgggctggggatcgggttctctcgcatgacggctcgtacgccacggtggagaagctgatcgagaacacaaatgatcagccactcgtctccattagccacttcggccataaggagcctatcaggtgcacgccggagcaccccattctggtgtggacggaccgggatgtcgagacactcatcgacggcgatggggctgacccgttcaacggcttcgtgtggctggctgctcaggacgtccatccatccgatttcattgttgctactgctccactggagacccgcgagaggagggtgttcgacctcatgaatcacgtcggcgaggggacgtacgaggaggttgacggcctgatccggaaggtgaacacagatgcgaggcatcggaataagcagcgccacaggcagggcttcgtcgctgttacccgctacgtggaggagagctacgacctcggcctgatcctcgggtggtacctcgccgagggccatgtctcgaagcgctctggggttgaggatgtgaggccaacgggcgtgcatttcacactgggggctaacgagattgagaggcacgtcgagctcggcatggccttcaagcaggtcttcggcgttgacctggtgctccacactaaccattcagatcactccaccaggatggtttgcaattctaagatcgtggctagcctcctgctctcgctggctggcacggggtactcaacaaagcggctcgcgcacgaggtcatgaccgctgacgaggatttccagaggggcctgctcgtcgggctcttccgcggcgacgggtgcaccacgacaggcgggatggtcctggacctcgttaaccaggagctgatcgatcaggtccagctgctcctgaggaggctcggcattgttagcgtggtccgcacgtacacaaaccaggctggcaatccgactgggcaggtgttcgtcccaggcctgcctgggaccaacgaggagttcatcttcgacgtggataagaacctccagaattacactggcaggaaggggaccaagcggactacctaccaggttgtgcatggccgccacgtctacgggattcgggctgttgagaggactggcgagaccccaaggcaggtctacaatctgcatgtggagggcactcatacttacactattaggggggctgtggttcataactccattgtggggacagccacgttcgatcagtactggagcgtgcgcacctctaagcggacttcaggaacagtgaccgtgaccgatcacttccgcgcctgggcgaaccggggcctgaacctcggcacaatagaccaaattacattgtgcgtggagggttaccaaagctctggatcagccaacatcacccagaacaccttctctcagggctcttcttccggcagttcgggtggctcatccggctccacaacgactactcgcatcgagtgtgagaacatgtccttgtccggaccctacgttagcaggatcaccaatccctttaatggtattgcgctgtacgccaacggagacacagcccgcgctaccgttaacttccccgcaagtcgcaactacaatttccgcctgcggggttgcggcaacaacaataatcttgcccgtgtggacctgaggatcgacggacggaccgtcgggaccttttattaccagggcacatacccctgggaggccccaattgacaatgtttatgtcagtgcggggagtcatacagtcgaaatcactgttactgcggataacggcacatgggacgtgtatgccgactacctggtgatacagtgactcgagggggggcccggtacccaattcgccctatagtgagtcgtattacaattcactggccgtcgttttacaacgtcgtgactgggaaaaccctggcgttacccaacttaatcgccttgcagcacatccccctttcgccagctggcgtaatagcgaagaggcccgcaccgatcgcccttcccaacagttgcgcagcctgaatggcgaatggaaattgtaagcgttaatattttgttaaaattcgcgttaaatttttgttaaatcagctcattttttaaccaataggccgaaatcggcaaaatcccttataaatcaaaagaatagaccgagatagggttgagtgttgttccagtttggaacaagagtccactattaaagaacgtggactccaacgtcaaagggcgaaaaaccgtctatcagggcgatggcccactacgtgaaccatcaccctaatcaagttttttggggtcgaggtgccgtaaagcactaaatcggaaccctaaagggagcccccgatttagagcttgacggggaaagccggcgaacgtggcgagaaaggaagggaagaaagcgaaaggagcgggcgctagggcgctggcaagtgtagcggtcacgctgcgcgtaaccaccacacccgccgcgcttaatgcgccgctacagggcgcgtcaggtg

SEQ ID NO: 3074 - DNA, 4847 bp, Artificial Sequence
  Synthetic Construct, AS-74 intein modified protein encoding nucleic acids in pBluescript
gcacttttcggggaaatgtgcgcggaacccctatttgtttatttttctaaatacattcaaatatgtatccgctcatgagacaataaccctgataaatgcttcaataatattgaaaaaggaagagtatgagtattcaacatttccgtgtcgcccttattcccttttttgcggcattttgccttcctgtttttgctcacccagaaacgctggtgaaagtaaaagatgctgaagatcagttgggtgcacgagtgggttacatcgaactggatctcaacagcggtaagatccttgagagttttcgccccgaagaacgttttccaatgatgagcacttttaaagttctgctatgtggcgcggtattatcccgtattgacgccgggcaagagcaactcggtcgccgcatacactattctcagaatgacttggttgagtactcaccagtcacagaaaagcatcttacggatggcatgacagtaagagaattatgcagtgctgccataaccatgagtgataacactgcggccaacttacttctgacaacgatcggaggaccgaaggagctaaccgcttttttgcacaacatgggggatcatgtaactcgccttgatcgttgggaaccggagctgaatgaagccataccaaacgacgagcgtgacaccacgatgcctgtagcaatggcaacaacgttgcgcaaactattaactggcgaactacttactctagcttcccggcaacaattaatagactggatggaggcggataaagttgcaggaccacttctgcgctcggcccttccggctggctggtttattgctgataaatctggagccggtgagcgtgggtctcgcggtatcattgcagcactggggccagatggtaagccctcccgtatcgtagttatctacacgacggggagtcaggcaactatggatgaacgaaatagacagatcgctgagataggtgcctcactgattaagcattggtaactgtcagaccaagtttactcatatatactttagattgatttaaaacttcatttttaatttaaaaggatctaggtgaagatcctttttgataatctcatgaccaaaatcccttaacgtgagttttcgttccactgagcgtcagaccccgtagaaaagatcaaaggatcttcttgagatcctttttttctgcgcgtaatctgctgcttgcaaacaaaaaaaccaccgctaccagcggtggtttgtttgccggatcaagagctaccaactctttttccgaaggtaactggcttcagcagagcgcagataccaaatactgtccttctagtgtagccgtagttaggccaccacttcaagaactctgtagcaccgcctacatacctcgctctgctaatcctgttaccagtggctgctgccagtggcgataagtcgtgtcttaccgggttggactcaagacgatagttaccggataaggcgcagcggtcgggctgaacggggggttcgtgcacacagcccagcttggagcgaacgacctacaccgaactgagatacctacagcgtgagctatgagaaagcgccacgcttcccgaagggagaaaggcggacaggtatccggtaagcggcagggtcggaacaggagagcgcacgagggagcttccagggggaaacgcctggtatctttatagtcctgtcgggtttcgccacctctgacttgagcgtcgatttttgtgatgctcgtcaggggggcggagcctatggaaaaacgccagcaacgcggcctttttacggttcctggccttttgctggccttttgctcacatgttctttcctgcgttatcccctgattctgtggataaccgtattaccgcctttgagtgagctgataccgctcgccgcagccgaacgaccgagcgcagcgagtcagtgagcgaggaagcggaagagcgcccaatacgcaaaccgcctctccccgcgcgttggccgattcattaatgcagctggcacgacaggtttcccgactggaaagcgggcagtgagcgcaacgcaattaatgtgagttagctcactcattaggcaccccaggctttacactttatgcttccggctcgtatgttgtgtggaattgtgagcggataacaatttcacacaggaaacagcatatgcaaacaagcattactctgacatccaacgcatccggtacgtttgacggttactattacgaactctggaaggatactggcaatacaacaatgacggtctacactcaaggtcgcttttcctgccagtggtcgaacatcaataacgcgttgtttaggaccgggaagaaatacaaccagaattggcagtctcttggcacaatccggatcacgtactctgcgacttacaacccaaacgggaactcctacttgtgtatctatggctggtctaccaacccattggtcgagttctacatcgttgagtcctgggggaactggagaccgcctggtgccacgtccctgggccaagtgacaatcgatggcgggacctacgacatctataggacgacacgcgtcaaccagccttgcgtggacggggacacaagcgttactctcgcctcgggggatgagaagcctattcgggacatcgtggagtcaacactggaggatccgacagagatcagcgacggcttctaccaggagtcggacattgatgtgctcaccacggatggcggggctgtcgctccaggcagggctaccaaggtttggaagcggcaggctcccgagaagatgtacaggatccggacagagtccggcagggagctggaggtcactccaagccaccccctgttcgtgcagtcagagggcgggctctccccactggtcgctgacgatctcagcgagaacgacttcgtggctgtcccgagggcgctgccagctgacgatggcgacgatttcgggcagcatgtggacgatctgggctccgtcaccgctcggaagacggctgacgctgaggccgtgcgctccgaggacgccgcgacaactccagatgttatccctaacgtgggcgaccagctccgcaggattcgcacctcgctcaggctgtctcagcacgactgcggcctgccaaggtcgacgtaccagcagtacgagaggggggaccggaatccttcgcgctctaggctccagacagtcctgactgcgttcgagcggcgcatcgagcagctctccagcctgtctgacagggtggacgatggcgactcagatgccattgctgccgcgcgggacgagctcaatccatcacaggcttccctggctagcggcatggatgctaccaggacggctatcggggacgatgagaggacggaggctaggccagacggcggggcggttgctgatgctgagagggctgtggctgacgctctctgcagggcgctggctgtcgccgacgatgttgagaggctcaggtcgctggctgacggcgatatcgggtgggacaggatcgattctattgagccagtcgagcctgaggacgagtgggtttacgatctggaggtggagagcacacactcatacctctctaatgatgttgtttcgcataattccattgtggggacagccacgttcgatcagtactggagcgtgcgcacctctaagcggacttcaggaacagtgaccgtgaccgatcacttccgcgcctgggcgaaccggggcctgaacctcggcacaatagaccaaattacattgtgcgtggagggttaccaaagctctggatcagccaacatcacccagaacaccttctctcagggctcttcttccggcagttcgggtggctcatccggctccacaacgactactcgcatcgagtgtgagaacatgtccttgtccggaccctacgttagcaggatcaccaatccctttaatggtattgcgctgtacgccaacggagacacagcccgcgctaccgttaacttccccgcaagtcgcaactacaatttccgcctgcggggttgcggcaacaacaataatcttgcccgtgtggacctgaggatcgacggacggaccgtcgggaccttttattaccagggcacatacccctgggaggccccaattgacaatgtttatgtcagtgcggggagtcatacagtcgaaatcactgttactgcggataacggcacatgggacgtgtatgccgactacctggtgatacagtgactcgagggggggcccggtacccaattcgccctatagtgagtcgtattacaattcactggccgtcgttttacaacgtcgtgactgggaaaaccctggcgttacccaacttaatcgccttgcagcacatccccctttcgccagctggcgtaatagcgaagaggcccgcaccgatcgcccttcccaacagttgcgcagcctgaatggcgaatggaaattgtaagcgttaatattttgttaaaattcgcgttaaatttttgttaaatcagctcattttttaaccaataggccgaaatcggcaaaatcccttataaatcaaaagaatagaccgagatagggttgagtgttgttccagtttggaacaagagtccactattaaagaacgtggactccaacgtcaaagggcgaaaaaccgtctatcagggcgatggcccactacgtgaaccatcaccctaatcaagttttttggggtcgaggtgccgtaaagcactaaatcggaaccctaaagggagcccccgatttagagcttgacggggaaagccggcgaacgtggcgagaaaggaagggaagaaagcgaaaggagcgggcgctagggcgctggcaagtgtagcggtcacgctgcgcgtaaccaccacacccgccgcgcttaatgcgccgctacagggcgcgtcaggtg

SEQ ID NO: 3075 - DNA, 5306 bp, Artificial Sequence
  Synthetic Construct, AS-75 intein modified protein encoding nucleic acids in pBluescript
gcacttttcggggaaatgtgcgcggaacccctatttgtttatttttctaaatacattcaaatatgtatccgctcatgagacaataaccctgataaatgcttcaataatattgaaaaaggaagagtatgagtattcaacatttccgtgtcgcccttattcccttttttgcggcattttgccttcctgtttttgctcacccagaaacgctggtgaaagtaaaagatgctgaagatcagttgggtgcacgagtgggttacatcgaactggatctcaacagcggtaagatccttgagagttttcgccccgaagaacgttttccaatgatgagcacttttaaagttctgctatgtggcgcggtattatcccgtattgacgccgggcaagagcaactcggtcgccgcatacactattctcagaatgacttggttgagtactcaccagtcacagaaaagcatcttacggatggcatgacagtaagagaattatgcagtgctgccataaccatgagtgataacactgcggccaacttacttctgacaacgatcggaggaccgaaggagctaaccgcttttttgcacaacatgggggatcatgtaactcgccttgatcgttgggaaccggagctgaatgaagccataccaaacgacgagcgtgacaccacgatgcctgtagcaatggcaacaacgttgcgcaaactattaactggcgaactacttactctagcttcccggcaacaattaatagactggatggaggcggataaagttgcaggaccacttctgcgctcggcccttccggctggctggtttattgctgataaatctggagccggtgagcgtgggtctcgcggtatcattgcagcactggggccagatggtaagccctcccgtatcgtagttatctacacgacggggagtcaggcaactatggatgaacgaaatagacagatcgctgagataggtgcctcactgattaagcattggtaactgtcagaccaagtttactcatatatactttagattgatttaaaacttcatttttaatttaaaaggatctaggtgaagatcctttttgataatctcatgaccaaaatcccttaacgtgagttttcgttccactgagcgtcagaccccgtagaaaagatcaaaggatcttcttgagatcctttttttctgcgcgtaatctgctgcttgcaaacaaaaaaaccaccgctaccagcggtggtttgtttgccggatcaagagctaccaactctttttccgaaggtaactggcttcagcagagcgcagataccaaatactgtccttctagtgtagccgtagttaggccaccacttcaagaactctgtagcaccgcctacatacctcgctctgctaatcctgttaccagtggctgctgccagtggcgataagtcgtgtcttaccgggttggactcaagacgatagttaccggataaggcgcagcggtcgggctgaacggggggttcgtgcacacagcccagcttggagcgaacgacctacaccgaactgagatacctacagcgtgagctatgagaaagcgccacgcttcccgaagggagaaaggcggacaggtatccggtaagcggcagggtcggaacaggagagcgcacgagggagcttccagggggaaacgcctggtatctttatagtcctgtcgggtttcgccacctctgacttgagcgtcgatttttgtgatgctcgtcaggggggcggagcctatggaaaaacgccagcaacgcggcctttttacggttcctggccttttgctggccttttgctcacatgttctttcctgcgttatcccctgattctgtggataaccgtattaccgcctttgagtgagctgataccgctcgccgcagccgaacgaccgagcgcagcgagtcagtgagcgaggaagcggaagagcgcccaatacgcaaaccgcctctccccgcgcgttggccgattcattaatgcagctggcacgacaggtttcccgactggaaagcgggcagtgagcgcaacgcaattaatgtgagttagctcactcattaggcaccccaggctttacactttatgcttccggctcgtatgttgtgtggaattgtgagcggataacaatttcacacaggaaacagcatatgcaaacaagcattactctgacatccaacgcatccggtacgtttgacggttactattacgaactctggaaggatactggcaatacaacaatgacggtctacactcaaggtcgcttttcctgccagtggtcgaacatcaataacgcgttgtttaggaccgggaagaaatacaaccagaattggcagtctcttggcacaatccggatcacgtactctgcgacttacaacccaaacgggaactcctacttgtgtatctatggctggtctaccaacccattggtcgagttctacatcgttgagtcctgggggaactggagaccgcctggtgccacgtccctgggccaagtgacaatcgatggcgggacctacgacatctataggacgacacgcgtcaaccagccttcaattcctgcggatgagcaggtcgtggttaggcgcaatggggagacggagctgacggagatcggccctctcgtggattcgctgatggattctcgcgagaccaggtcattcgacgatcacgaggtcacgctcgctccagacggcatcgaggttccctctctgtccagcgaggagaccgttgagtggaagccgattgaggaggtgtcacgccacgagacgccagacgagctcctgaggttcgagctggagtcgggcaggtctatcagggctaccaaggctcattctttcgtcacgcgccaggagaacgaggtggtcccagttgctggggaggagctggaggctggcgactggctccctgttgtggcttcgctggacgccaccgatacgcaggagacagtggacctgaggaagtacctcccggcgggcgattactggtacacttccgtgctcgccgacggcggggctgaggctgtcccaggcgggcccgaccagctgaggaacaagagggctgctctggaggctggcgagctcgctgagcacacagcttacccagtgcagggcactgtcgggctcccagagcagttccctctggacgaggagaccgggttcttcgtgggcgcttggctggctgagggcagcctcgcggatcattacgtttccatcagcaatgtggacgctgccttccagagccgcattaggtcgttcgccgagcgcttcgatctcacggtcaacgagtacgagaatgactccgggttcgcggctggctacgatatccggctgaacggcaccattctgagcgacttcctcagggctgcttgcacggacgatggcgagaagtcgatccccgggttcgctattggcgccaatgaggcgttcctcaaggggctcctgcagggctacttctccggcgatgggaacgtgggcaccaatgcgatcaggtcgtcttcaacaagcgacaggctgactgctggcgttgggctcctgctcgctaggttcgatgtgtacgccacactcggccagcaggaggactcacgcactctgagggtcccaaagaagcacgtttcccggttcgacaaccgcatcggcatggtcggggagaggggcgctgagctggaggctctcgctgagtcagctgactccgatgggccagacgctacagatcagatccctaacttcggcgatgctctggaggctgtggctgaggctgctgacatcccacagaggcaggtcaattcggccacgaagcggcagcgcattgacaggtctcggctggctaggctcgtggctgctgctgaggccgagctggacggggagcagtccgagctggatgcgctcaggcaggctgtcacaggcgacgtcgtttgggatcggatcgagtccattgagactgtggagagcgaccatgagtatgtgtacgatgtttcagtggaggggctggagactttcacaactgcggatggggtcgttactcataattccattgtggggacagccacgttcgatcagtactggagcgtgcgcacctctaagcggacttcaggaacagtgaccgtgaccgatcacttccgcgcctgggcgaaccggggcctgaacctcggcacaatagaccaaattacattgtgcgtggagggttaccaaagctctggatcagccaacatcacccagaacaccttctctcagggctcttcttccggcagttcgggtggctcatccggctccacaacgactactcgcatcgagtgtgagaacatgtccttgtccggaccctacgttagcaggatcaccaatccctttaatggtattgcgctgtacgccaacggagacacagcccgcgctaccgttaacttccccgcaagtcgcaactacaatttccgcctgcggggttgcggcaacaacaataatcttgcccgtgtggacctgaggatcgacggacggaccgtcgggaccttttattaccagggcacatacccctgggaggccccaattgacaatgtttatgtcagtgcggggagtcatacagtcgaaatcactgttactgcggataacggcacatgggacgtgtatgccgactacctggtgatacagtgactcgagggggggcccggtacccaattcgccctatagtgagtcgtattacaattcactggccgtcgttttacaacgtcgtgactgggaaaaccctggcgttacccaacttaatcgccttgcagcacatccccctttcgccagctggcgtaatagcgaagaggcccgcaccgatcgcccttcccaacagttgcgcagcctgaatggcgaatggaaattgtaagcgttaatattttgttaaaattcgcgttaaatttttgttaaatcagctcattttttaaccaataggccgaaatcggcaaaatcccttataaatcaaaagaatagaccgagatagggttgagtgttgttccagtttggaacaagagtccactattaaagaacgtggactccaacgtcaaagggcgaaaaaccgtctatcagggcgatggcccactacgtgaaccatcaccctaatcaagttttttggggtcgaggtgccgtaaagcactaaatcggaaccctaaagggagcccccgatttagagcttgacggggaaagccggcgaacgtggcgagaaaggaagggaagaaagcgaaaggagcgggcgctagggcgctggcaagtgtagcggtcacgctgcgcgtaaccaccacacccgccgcgcttaatgcgccgctacagggcgcgtcaggtg

SEQ ID NO: 3076 - DNA, 4796 bp, Artificial Sequence
  Synthetic Construct, AS-76 intein modified protein encoding nucleic acids in pBluescript
gcacttttcggggaaatgtgcgcggaacccctatttgtttatttttctaaatacattcaaatatgtatccgctcatgagacaataaccctgataaatgcttcaataatattgaaaaaggaagagtatgagtattcaacatttccgtgtcgcccttattcccttttttgcggcattttgccttcctgtttttgctcacccagaaacgctggtgaaagtaaaagatgctgaagatcagttgggtgcacgagtgggttacatcgaactggatctcaacagcggtaagatccttgagagttttcgccccgaagaacgttttccaatgatgagcacttttaaagttctgctatgtggcgcggtattatcccgtattgacgccgggcaagagcaactcggtcgccgcatacactattctcagaatgacttggttgagtactcaccagtcacagaaaagcatcttacggatggcatgacagtaagagaattatgcagtgctgccataaccatgagtgataacactgcggccaacttacttctgacaacgatcggaggaccgaaggagctaaccgcttttttgcacaacatgggggatcatgtaactcgccttgatcgttgggaaccggagctgaatgaagccataccaaacgacgagcgtgacaccacgatgcctgtagcaatggcaacaacgttgcgcaaactattaactggcgaactacttactctagcttcccggcaacaattaatagactggatggaggcggataaagttgcaggaccacttctgcgctcggcccttccggctggctggtttattgctgataaatctggagccggtgagcgtgggtctcgcggtatcattgcagcactggggccagatggtaagccctcccgtatcgtagttatctacacgacggggagtcaggcaactatggatgaacgaaatagacagatcgctgagataggtgcctcactgattaagcattggtaactgtcagaccaagtttactcatatatactttagattgatttaaaacttcatttttaatttaaaaggatctaggtgaagatcctttttgataatctcatgaccaaaatcccttaacgtgagttttcgttccactgagcgtcagaccccgtagaaaagatcaaaggatcttcttgagatcctttttttctgcgcgtaatctgctgcttgcaaacaaaaaaaccaccgctaccagcggtggtttgtttgccggatcaagagctaccaactctttttccgaaggtaactggcttcagcagagcgcagataccaaatactgtccttctagtgtagccgtagttaggccaccacttcaagaactctgtagcaccgcctacatacctcgctctgctaatcctgttaccagtggctgctgccagtggcgataagtcgtgtcttaccgggttggactcaagacgatagttaccggataaggcgcagcggtcgggctgaacggggggttcgtgcacacagcccagcttggagcgaacgacctacaccgaactgagatacctacagcgtgagctatgagaaagcgccacgcttcccgaagggagaaaggcggacaggtatccggtaagcggcagggtcggaacaggagagcgcacgagggagcttccagggggaaacgcctggtatctttatagtcctgtcgggtttcgccacctctgacttgagcgtcgatttttgtgatgctcgtcaggggggcggagcctatggaaaaacgccagcaacgcggcctttttacggttcctggccttttgctggccttttgctcacatgttctttcctgcgttatcccctgattctgtggataaccgtattaccgcctttgagtgagctgataccgctcgccgcagccgaacgaccgagcgcagcgagtcagtgagcgaggaagcggaagagcgcccaatacgcaaaccgcctctccccgcgcgttggccgattcattaatgcagctggcacgacaggtttcccgactggaaagcgggcagtgagcgcaacgcaattaatgtgagttagctcactcattaggcaccccaggctttacactttatgcttccggctcgtatgttgtgtggaattgtgagcggataacaatttcacacaggaaacagcatatgcaaacaagcattactctgacatccaacgcatccggtacgtttgacggttactattacgaactctggaaggatactggcaatacaacaatgacggtctacactcaaggtcgcttttcctgccagtggtcgaacatcaataacgcgttgtttaggaccgggaagaaatacaaccagaattggcagtctcttggcacaatccggatcacgtactctgcgacttacaacccaaacgggaactcctacttgtgtatctatggctggtctaccaacccattggtcgagttctacatcgttgagtcctgggggaactggagaccgcctggtgccacgtccctgggccaagtgacaatcgatggcgggacctacgacatctataggacgacacgcgtcaaccagccttgcttcatcggggatactctcattccgctcgctgacggcaagtcttaccgcatcaaggatctcatggactgggggacggagttcatcgtttacgcgtgcaccccaacgggcaagattgtggctgctcaggctaccgctaagctcacgaggaggaacgctccactcgtgaaggtcatcctggacaatggcgaggagatcatttgcacacccgaccaccagttcatgctgcgggatgggacttacaaggaggcccagctcctgcaggcggagacatcactcatgccattctactccaagactgacaaggatggctacacactgattactcagccttactccagcaggtggcagaaggctcactggatcattgctaggtctggcctcctggggaaggtgccaaggttcgagggccagaagacgttcatccaccatcagaacttcgacgagagcgataaccgccccgagaacctggagttcatgggcaacagggaccactcggcgtaccatcgctctctggtggagaggaatcagcactggcattccgctgagttcgaggagaagagggtcgctagcctcgctcagaaggctaagacctcggagggctaccagtactacgccgagagggggacgcggaacatcttccagtacatggagcagcagccagagcacttcaagaatgcggtcgctggcaacgggaataggggcaagcagtacctcgttgagtacaacaagacagagaagggcagggggaagtcgcaggagatcgcgaaccggtactacacctgcgagatttgcggcgtcgacgttaagacgcccatcgggctgcacaaccatcggcgcaaggagcaccagtgcaatcataaggtggtcgccgtgaacctcctgaattacaccgaggatgtctactgcctcactgttccggagtaccacaacttcgctctcaaggctggggtcttcgttcataattccattgtggggacagccacgttcgatcagtactggagcgtgcgcacctctaagcggacttcaggaacagtgaccgtgaccgatcacttccgcgcctgggcgaaccggggcctgaacctcggcacaatagaccaaattacattgtgcgtggagggttaccaaagctctggatcagccaacatcacccagaacaccttctctcagggctcttcttccggcagttcgggtggctcatccggctccacaacgactactcgcatcgagtgtgagaacatgtccttgtccggaccctacgttagcaggatcaccaatccctttaatggtattgcgctgtacgccaacggagacacagcccgcgctaccgttaacttccccgcaagtcgcaactacaatttccgcctgcggggttgcggcaacaacaataatcttgcccgtgtggacctgaggatcgacggacggaccgtcgggaccttttattaccagggcacatacccctgggaggccccaattgacaatgtttatgtcagtgcggggagtcatacagtcgaaatcactgttactgcggataacggcacatgggacgtgtatgccgactacctggtgatacagtgactcgagggggggcccggtacccaattcgccctatagtgagtcgtattacaattcactggccgtcgttttacaacgtcgtgactgggaaaaccctggcgttacccaacttaatcgccttgcagcacatccccctttcgccagctggcgtaatagcgaagaggcccgcaccgatcgcccttcccaacagttgcgcagcctgaatggcgaatggaaattgtaagcgttaatattttgttaaaattcgcgttaaatttttgttaaatcagctcattttttaaccaataggccgaaatcggcaaaatcccttataaatcaaaagaatagaccgagatagggttgagtgttgttccagtttggaacaagagtccactattaaagaacgtggactccaacgtcaaagggcgaaaaaccgtctatcagggcgatggcccactacgtgaaccatcaccctaatcaagttttttggggtcgaggtgccgtaaagcactaaatcggaaccctaaagggagcccccgatttagagcttgacggggaaagccggcgaacgtggcgagaaaggaagggaagaaagcgaaaggagcgggcgctagggcgctggcaagtgtagcggtcacgctgcgcgtaaccaccacacccgccgcgcttaatgcgccgctacagggcgcgtcaggtg

SEQ ID NO: 3077 - DNA, 4886 bp, Artificial Sequence
  Synthetic Construct, AS-77 intein modified protein encoding nucleic acids in pBluescript
gcacttttcggggaaatgtgcgcggaacccctatttgtttatttttctaaatacattcaaatatgtatccgctcatgagacaataaccctgataaatgcttcaataatattgaaaaaggaagagtatgagtattcaacatttccgtgtcgcccttattcccttttttgcggcattttgccttcctgtttttgctcacccagaaacgctggtgaaagtaaaagatgctgaagatcagttgggtgcacgagtgggttacatcgaactggatctcaacagcggtaagatccttgagagttttcgccccgaagaacgttttccaatgatgagcacttttaaagttctgctatgtggcgcggtattatcccgtattgacgccgggcaagagcaactcggtcgccgcatacactattctcagaatgacttggttgagtactcaccagtcacagaaaagcatcttacggatggcatgacagtaagagaattatgcagtgctgccataaccatgagtgataacactgcggccaacttacttctgacaacgatcggaggaccgaaggagctaaccgcttttttgcacaacatgggggatcatgtaactcgccttgatcgttgggaaccggagctgaatgaagccataccaaacgacgagcgtgacaccacgatgcctgtagcaatggcaacaacgttgcgcaaactattaactggcgaactacttactctagcttcccggcaacaattaatagactggatggaggcggataaagttgcaggaccacttctgcgctcggcccttccggctggctggtttattgctgataaatctggagccggtgagcgtgggtctcgcggtatcattgcagcactggggccagatggtaagccctcccgtatcgtagttatctacacgacggggagtcaggcaactatggatgaacgaaatagacagatcgctgagataggtgcctcactgattaagcattggtaactgtcagaccaagtttactcatatatactttagattgatttaaaacttcatttttaatttaaaaggatctaggtgaagatcctttttgataatctcatgaccaaaatcccttaacgtgagttttcgttccactgagcgtcagaccccgtagaaaagatcaaaggatcttcttgagatcctttttttctgcgcgtaatctgctgcttgcaaacaaaaaaaccaccgctaccagcggtggtttgtttgccggatcaagagctaccaactctttttccgaaggtaactggcttcagcagagcgcagataccaaatactgtccttctagtgtagccgtagttaggccaccacttcaagaactctgtagcaccgcctacatacctcgctctgctaatcctgttaccagtggctgctgccagtggcgataagtcgtgtcttaccgggttggactcaagacgatagttaccggataaggcgcagcggtcgggctgaacggggggttcgtgcacacagcccagcttggagcgaacgacctacaccgaactgagatacctacagcgtgagctatgagaaagcgccacgcttcccgaagggagaaaggcggacaggtatccggtaagcggcagggtcggaacaggagagcgcacgagggagcttccagggggaaacgcctggtatctttatagtcctgtcgggtttcgccacctctgacttgagcgtcgatttttgtgatgctcgtcaggggggcggagcctatggaaaaacgccagcaacgcggcctttttacggttcctggccttttgctggccttttgctcacatgttctttcctgcgttatcccctgattctgtggataaccgtattaccgcctttgagtgagctgataccgctcgccgcagccgaacgaccgagcgcagcgagtcagtgagcgaggaagcggaagagcgcccaatacgcaaaccgcctctccccgcgcgttggccgattcattaatgcagctggcacgacaggtttcccgactggaaagcgggcagtgagcgcaacgcaattaatgtgagttagctcactcattaggcaccccaggctttacactttatgcttccggctcgtatgttgtgtggaattgtgagcggataacaatttcacacaggaaacagcatatgcaaacaagcattactctgacatccaacgcatccggtacgtttgacggttactattacgaactctggaaggatactggcaatacaacaatgacggtctacactcaaggtcgcttttcctgccagtggtcgaacatcaataacgcgttgtttaggaccgggaagaaatacaaccagaattggcagtctcttggcacaatccggatcacgtactctgcgacttacaacccaaacgggaactcctacttgtgtatctatggctggtctaccaacccattggtcgagttctacatcgttgagtcctgggggaactggagaccgcctggtgccacgtccctgggccaagtgacaatcgatggcgggacctacgacatctataggacgacacgcgtcaaccagcctgctctcgctctggataccgctctccctacgccttcggggtggactactatgggggacgttcaggttggggatcagctctacgatgcgcacggcaggccaaccacggtggtcgctgctaccgaggtgctcacggggaggccttgctacgaggtcgagttctcagacggctcccgcatcgttgccgatgcgcagcatcagtggctgaccgagtctagggctgctcggaagtcacgctgggctgctgacaagcagtacaaccgcgccaggaaccagaatatcgtcgcgagcgttgtgacaactgaggctattgctgggaccctcagggtgggcgctgaccagagggccaatcacgctgtcctcacggctgatccactgtccggcagcgacgtcgatctgccaatcccaccctacgttctcggcgcttggctgggcgacgggcactcggcgtctgctaggatcacctgcgagacgccagagattcctatgtacctggaggcttgcgggctgagggtcgaccatcagggcgcgatgctctactccctgaagttcccagacggcgatccgaggggcagcgtccagggcgttctcaggaccatcggcgtgctgaacgacaagcacattccagcggattacctcagggcttccgagggccagaggagggacctcctggctgggctgatggacacagatggcactgtcgttaggggcgttgggtcgtgccagttcgctgtgacaaacaagcggctcgcggacgatgtctacgagctcgtggtctctctggggtacaagtgcggcaggaccacgaggagggtgcagggcaggagcccagagacatcgacttgccatatcctcaatttctcgacggtggacgatgtcttcaggctggagcggaagcacctcctgcataaggaggagaggccagtgacacgggctaggatcgccaggcggtacattactgccgttcgcccaattgagtccgttcctgtgaggtgcgtggaggttgataatacagagcatctctacctcgccggggagagcatgattccaactcataattccattgtggggacagccacgttcgatcagtactggagcgtgcgcacctctaagcggacttcaggaacagtgaccgtgaccgatcacttccgcgcctgggcgaaccggggcctgaacctcggcacaatagaccaaattacattgtgcgtggagggttaccaaagctctggatcagccaacatcacccagaacaccttctctcagggctcttcttccggcagttcgggtggctcatccggctccacaacgactactcgcatcgagtgtgagaacatgtccttgtccggaccctacgttagcaggatcaccaatccctttaatggtattgcgctgtacgccaacggagacacagcccgcgctaccgttaacttccccgcaagtcgcaactacaatttccgcctgcggggttgcggcaacaacaataatcttgcccgtgtggacctgaggatcgacggacggaccgtcgggaccttttattaccagggcacatacccctgggaggccccaattgacaatgtttatgtcagtgcggggagtcatacagtcgaaatcactgttactgcggataacggcacatgggacgtgtatgccgactacctggtgatacagtgactcgagggggggcccggtacccaattcgccctatagtgagtcgtattacaattcactggccgtcgttttacaacgtcgtgactgggaaaaccctggcgttacccaacttaatcgccttgcagcacatccccctttcgccagctggcgtaatagcgaagaggcccgcaccgatcgcccttcccaacagttgcgcagcctgaatggcgaatggaaattgtaagcgttaatattttgttaaaattcgcgttaaatttttgttaaatcagctcattttttaaccaataggccgaaatcggcaaaatcccttataaatcaaaagaatagaccgagatagggttgagtgttgttccagtttggaacaagagtccactattaaagaacgtggactccaacgtcaaagggcgaaaaaccgtctatcagggcgatggcccactacgtgaaccatcaccctaatcaagttttttggggtcgaggtgccgtaaagcactaaatcggaaccctaaagggagcccccgatttagagcttgacggggaaagccggcgaacgtggcgagaaaggaagggaagaaagcgaaaggagcgggcgctagggcgctggcaagtgtagcggtcacgctgcgcgtaaccaccacacccgccgcgcttaatgcgccgctacagggcgcgtcaggtg

SEQ ID NO: 3078 - DNA, 5051 bp, Artificial Sequence
  Synthetic Construct, AS-78 intein modified protein encoding nucleic acids in pBluescript
gcacttttcggggaaatgtgcgcggaacccctatttgtttatttttctaaatacattcaaatatgtatccgctcatgagacaataaccctgataaatgcttcaataatattgaaaaaggaagagtatgagtattcaacatttccgtgtcgcccttattcccttttttgcggcattttgccttcctgtttttgctcacccagaaacgctggtgaaagtaaaagatgctgaagatcagttgggtgcacgagtgggttacatcgaactggatctcaacagcggtaagatccttgagagttttcgccccgaagaacgttttccaatgatgagcacttttaaagttctgctatgtggcgcggtattatcccgtattgacgccgggcaagagcaactcggtcgccgcatacactattctcagaatgacttggttgagtactcaccagtcacagaaaagcatcttacggatggcatgacagtaagagaattatgcagtgctgccataaccatgagtgataacactgcggccaacttacttctgacaacgatcggaggaccgaaggagctaaccgcttttttgcacaacatgggggatcatgtaactcgccttgatcgttgggaaccggagctgaatgaagccataccaaacgacgagcgtgacaccacgatgcctgtagcaatggcaacaacgttgcgcaaactattaactggcgaactacttactctagcttcccggcaacaattaatagactggatggaggcggataaagttgcaggaccacttctgcgctcggcccttccggctggctggtttattgctgataaatctggagccggtgagcgtgggtctcgcggtatcattgcagcactggggccagatggtaagccctcccgtatcgtagttatctacacgacggggagtcaggcaactatggatgaacgaaatagacagatcgctgagataggtgcctcactgattaagcattggtaactgtcagaccaagtttactcatatatactttagattgatttaaaacttcatttttaatttaaaaggatctaggtgaagatcctttttgataatctcatgaccaaaatcccttaacgtgagttttcgttccactgagcgtcagaccccgtagaaaagatcaaaggatcttcttgagatcctttttttctgcgcgtaatctgctgcttgcaaacaaaaaaaccaccgctaccagcggtggtttgtttgccggatcaagagctaccaactctttttccgaaggtaactggcttcagcagagcgcagataccaaatactgtccttctagtgtagccgtagttaggccaccacttcaagaactctgtagcaccgcctacatacctcgctctgctaatcctgttaccagtggctgctgccagtggcgataagtcgtgtcttaccgggttggactcaagacgatagttaccggataaggcgcagcggtcgggctgaacggggggttcgtgcacacagcccagcttggagcgaacgacctacaccgaactgagatacctacagcgtgagctatgagaaagcgccacgcttcccgaagggagaaaggcggacaggtatccggtaagcggcagggtcggaacaggagagcgcacgagggagcttccagggggaaacgcctggtatctttatagtcctgtcgggtttcgccacctctgacttgagcgtcgatttttgtgatgctcgtcaggggggcggagcctatggaaaaacgccagcaacgcggcctttttacggttcctggccttttgctggccttttgctcacatgttctttcctgcgttatcccctgattctgtggataaccgtattaccgcctttgagtgagctgataccgctcgccgcagccgaacgaccgagcgcagcgagtcagtgagcgaggaagcggaagagcgcccaatacgcaaaccgcctctccccgcgcgttggccgattcattaatgcagctggcacgacaggtttcccgactggaaagcgggcagtgagcgcaacgcaattaatgtgagttagctcactcattaggcaccccaggctttacactttatgcttccggctcgtatgttgtgtggaattgtgagcggataacaatttcacacaggaaacagcatatgcaaacaagcattactctgacatccaacgcatccggtacgtttgacggttactattacgaactctggaaggatactggcaatacaacaatgacggtctacactcaaggtcgcttttcctgccagtggtcgaacatcaataacgcgttgtttaggaccgggaagaaatacaaccagaattggcagtctcttggcacaatccggatcacgtactctgcgacttacaacccaaacgggaactcctacttgtgtatctatggctggtctaccaacccattggtcgagttctacatcgttgagtcctgggggaactggagaccgcctggtgccacgtccctgggccaagtgacaatcgatggcgggacctacgacatctataggacgacacgcgtcaaccagccttgcctccctgaggatgcgctggttcataccgctaaggggctggtccctattcgggatgttcaggtcggggatctcgttcagacaccgctcggcttccgcagggtggtcgacaagttcgatcagggcttccaggacgtgtacgagatcgagactaacgcgacctacccacgcgctacgctcaatcacaggcaggctgtcctggaggacgctaagggcgggatcgtttggaagcatattgcttcgctggaggccggcgataggctcctgcacaacaagcaggtcctcccgggcactgttacccatctgcccgcggacttcactgagagcaggccatcacactcccggaccgccaagtcgttcgttgtgcctgagctcacggctgaggtggcttggctgatcggcttcacacatggcgacggctacgtggctctcggcaggaacaagtacgataagccgtacgggcgggttgagtggtccatgaactccctggacgctgaggtcacctcccgcatccaggctaagattgatgctgctctcgctctgttcggcctctccgctgtccacagcatcacgaagggcgagaacacagctaagagcatctgctccagcattcggctggccgagtacttccaccgccatatcaagcagccaaatattcctctcactgtgccgtcattcatcctgcagggctccgtcgacattagggctgcttacctcgctggcctgatggactccgatggggctgtgaacaataggccaccacacctcatcacatcggtgtaccggtctttcattcgccaggtctcggtcgttctctcgtctctgggcatcgccgggaggctgaccacgacatacccccagaactctaattggcaggtcaagtacaacctcacgatcccggcgctgaaggagcgctacaatgctctcatttctccccattcagccaagggcgagctcaggcaggggctgaagatgtacggcttcacggttccaggggccgtgatgcgggagacgtacacatactctgagatgagggagatgggcttccaggggtcacggacagttgacgccaactacgagcgctacgtggcggaggctgacatctccctcgatattcctgtgactgtcaagggcctggggagctacgatcacgtgcagacctacgacattgaggttgatgaggctcattgcttctactgcgatggctacctcacacataattccattgtggggacagccacgttcgatcagtactggagcgtgcgcacctctaagcggacttcaggaacagtgaccgtgaccgatcacttccgcgcctgggcgaaccggggcctgaacctcggcacaatagaccaaattacattgtgcgtggagggttaccaaagctctggatcagccaacatcacccagaacaccttctctcagggctcttcttccggcagttcgggtggctcatccggctccacaacgactactcgcatcgagtgtgagaacatgtccttgtccggaccctacgttagcaggatcaccaatccctttaatggtattgcgctgtacgccaacggagacacagcccgcgctaccgttaacttccccgcaagtcgcaactacaatttccgcctgcggggttgcggcaacaacaataatcttgcccgtgtggacctgaggatcgacggacggaccgtcgggaccttttattaccagggcacatacccctgggaggccccaattgacaatgtttatgtcagtgcggggagtcatacagtcgaaatcactgttactgcggataacggcacatgggacgtgtatgccgactacctggtgatacagtgactcgagggggggcccggtacccaattcgccctatagtgagtcgtattacaattcactggccgtcgttttacaacgtcgtgactgggaaaaccctggcgttacccaacttaatcgccttgcagcacatccccctttcgccagctggcgtaatagcgaagaggcccgcaccgatcgcccttcccaacagttgcgcagcctgaatggcgaatggaaattgtaagcgttaatattttgttaaaattcgcgttaaatttttgttaaatcagctcattttttaaccaataggccgaaatcggcaaaatcccttataaatcaaaagaatagaccgagatagggttgagtgttgttccagtttggaacaagagtccactattaaagaacgtggactccaacgtcaaagggcgaaaaaccgtctatcagggcgatggcccactacgtgaaccatcaccctaatcaagttttttggggtcgaggtgccgtaaagcactaaatcggaaccctaaagggagcccccgatttagagcttgacggggaaagccggcgaacgtggcgagaaaggaagggaagaaagcgaaaggagcgggcgctagggcgctggcaagtgtagcggtcacgctgcgcgtaaccaccacacccgccgcgcttaatgcgccgctacagggcgcgtcaggtg

SEQ ID NO: 3079 - DNA, 4322 bp, Artificial Sequence
  Synthetic Construct, AS-79 intein modified protein encoding nucleic acids in pBluescript
gcacttttcggggaaatgtgcgcggaacccctatttgtttatttttctaaatacattcaaatatgtatccgctcatgagacaataaccctgataaatgcttcaataatattgaaaaaggaagagtatgagtattcaacatttccgtgtcgcccttattcccttttttgcggcattttgccttcctgtttttgctcacccagaaacgctggtgaaagtaaaagatgctgaagatcagttgggtgcacgagtgggttacatcgaactggatctcaacagcggtaagatccttgagagttttcgccccgaagaacgttttccaatgatgagcacttttaaagttctgctatgtggcgcggtattatcccgtattgacgccgggcaagagcaactcggtcgccgcatacactattctcagaatgacttggttgagtactcaccagtcacagaaaagcatcttacggatggcatgacagtaagagaattatgcagtgctgccataaccatgagtgataacactgcggccaacttacttctgacaacgatcggaggaccgaaggagctaaccgcttttttgcacaacatgggggatcatgtaactcgccttgatcgttgggaaccggagctgaatgaagccataccaaacgacgagcgtgacaccacgatgcctgtagcaatggcaacaacgttgcgcaaactattaactggcgaactacttactctagcttcccggcaacaattaatagactggatggaggcggataaagttgcaggaccacttctgcgctcggcccttccggctggctggtttattgctgataaatctggagccggtgagcgtgggtctcgcggtatcattgcagcactggggccagatggtaagccctcccgtatcgtagttatctacacgacggggagtcaggcaactatggatgaacgaaatagacagatcgctgagataggtgcctcactgattaagcattggtaactgtcagaccaagtttactcatatatactttagattgatttaaaacttcatttttaatttaaaaggatctaggtgaagatcctttttgataatctcatgaccaaaatcccttaacgtgagttttcgttccactgagcgtcagaccccgtagaaaagatcaaaggatcttcttgagatcctttttttctgcgcgtaatctgctgcttgcaaacaaaaaaaccaccgctaccagcggtggtttgtttgccggatcaagagctaccaactctttttccgaaggtaactggcttcagcagagcgcagataccaaatactgtccttctagtgtagccgtagttaggccaccacttcaagaactctgtagcaccgcctacatacctcgctctgctaatcctgttaccagtggctgctgccagtggcgataagtcgtgtcttaccgggttggactcaagacgatagttaccggataaggcgcagcggtcgggctgaacggggggttcgtgcacacagcccagcttggagcgaacgacctacaccgaactgagatacctacagcgtgagctatgagaaagcgccacgcttcccgaagggagaaaggcggacaggtatccggtaagcggcagggtcggaacaggagagcgcacgagggagcttccagggggaaacgcctggtatctttatagtcctgtcgggtttcgccacctctgacttgagcgtcgatttttgtgatgctcgtcaggggggcggagcctatggaaaaacgccagcaacgcggcctttttacggttcctggccttttgctggccttttgctcacatgttctttcctgcgttatcccctgattctgtggataaccgtattaccgcctttgagtgagctgataccgctcgccgcagccgaacgaccgagcgcagcgagtcagtgagcgaggaagcggaagagcgcccaatacgcaaaccgcctctccccgcgcgttggccgattcattaatgcagctggcacgacaggtttcccgactggaaagcgggcagtgagcgcaacgcaattaatgtgagttagctcactcattaggcaccccaggctttacactttatgcttccggctcgtatgttgtgtggaattgtgagcggataacaatttcacacaggaaacagcatatgcaaacaagcattactctgacatccaacgcatccggtacgtttgacggttactattacgaactctggaaggatactggcaatacaacaatgacggtctacactcaaggtcgcttttcctgccagtggtcgaacatcaataacgcgttgtttaggaccgggaagaaatacaaccagaattggcagtctcttggcacaatccggatcacgtactctgcgacttacaacccaaacgggaactcctacttgtgtatctatggctggtctaccaacccattggtcgagttctacatcgttgagtcctgggggaactggagaccgcctggtgccacgtccctgggccaagtgacaatcgatggcgggacctacgacatctataggacgacacgcgtcaaccagccttgcgtggattacgagactgaggtcgtgctggggaatggggagcggaagaagatcggggagatcgtggagcgggctattgaggaggctgagaagaacggcaagctcgggcgggttgacgatggcttctacgctccgatcgacattgaggtctactcgctcgatctggagaccctcaaggttcggaaggcgcgggcaaatatcgcgtggaagcgcacagctccaaagaagatgatgctggtgaagactaggggcgggaagcgcattagggtcaccccgacgcaccccttcttcgttctggaggagggcaaggtggctatgaggaaggcccgggacctggaggagggcaacaagatcgccacgattgaggggctctccgtgagctgggacgaggtcgcggagatcctggagtacgagccaaaggatccttgggtctacgatctgcaggttccaggctaccacaacttcctcgctaatggcatcttcgttcataattccattgtggggacagccacgttcgatcagtactggagcgtgcgcacctctaagcggacttcaggaacagtgaccgtgaccgatcacttccgcgcctgggcgaaccggggcctgaacctcggcacaatagaccaaattacattgtgcgtggagggttaccaaagctctggatcagccaacatcacccagaacaccttctctcagggctcttcttccggcagttcgggtggctcatccggctccacaacgactactcgcatcgagtgtgagaacatgtccttgtccggaccctacgttagcaggatcaccaatccctttaatggtattgcgctgtacgccaacggagacacagcccgcgctaccgttaacttccccgcaagtcgcaactacaatttccgcctgcggggttgcggcaacaacaataatcttgcccgtgtggacctgaggatcgacggacggaccgtcgggaccttttattaccagggcacatacccctgggaggccccaattgacaatgtttatgtcagtgcggggagtcatacagtcgaaatcactgttactgcggataacggcacatgggacgtgtatgccgactacctggtgatacagtgactcgagggggggcccggtacccaattcgccctatagtgagtcgtattacaattcactggccgtcgttttacaacgtcgtgactgggaaaaccctggcgttacccaacttaatcgccttgcagcacatccccctttcgccagctggcgtaatagcgaagaggcccgcaccgatcgcccttcccaacagttgcgcagcctgaatggcgaatggaaattgtaagcgttaatattttgttaaaattcgcgttaaatttttgttaaatcagctcattttttaaccaataggccgaaatcggcaaaatcccttataaatcaaaagaatagaccgagatagggttgagtgttgttccagtttggaacaagagtccactattaaagaacgtggactccaacgtcaaagggcgaaaaaccgtctatcagggcgatggcccactacgtgaaccatcaccctaatcaagttttttggggtcgaggtgccgtaaagcactaaatcggaaccctaaagggagcccccgatttagagcttgacggggaaagccggcgaacgtggcgagaaaggaagggaagaaagcgaaaggagcgggcgctagggcgctggcaagtgtagcggtcacgctgcgcgtaaccaccacacccgccgcgcttaatgcgccgctacagggcgcgtcaggtg

SEQ ID NO: 3080 - DNA, 4634 bp, Artificial Sequence
  Synthetic Construct, AS-80 intein modified protein encoding nucleic acids in pBluescript
gcacttttcggggaaatgtgcgcggaacccctatttgtttatttttctaaatacattcaaatatgtatccgctcatgagacaataaccctgataaatgcttcaataatattgaaaaaggaagagtatgagtattcaacatttccgtgtcgcccttattcccttttttgcggcattttgccttcctgtttttgctcacccagaaacgctggtgaaagtaaaagatgctgaagatcagttgggtgcacgagtgggttacatcgaactggatctcaacagcggtaagatccttgagagttttcgccccgaagaacgttttccaatgatgagcacttttaaagttctgctatgtggcgcggtattatcccgtattgacgccgggcaagagcaactcggtcgccgcatacactattctcagaatgacttggttgagtactcaccagtcacagaaaagcatcttacggatggcatgacagtaagagaattatgcagtgctgccataaccatgagtgataacactgcggccaacttacttctgacaacgatcggaggaccgaaggagctaaccgcttttttgcacaacatgggggatcatgtaactcgccttgatcgttgggaaccggagctgaatgaagccataccaaacgacgagcgtgacaccacgatgcctgtagcaatggcaacaacgttgcgcaaactattaactggcgaactacttactctagcttcccggcaacaattaatagactggatggaggcggataaagttgcaggaccacttctgcgctcggcccttccggctggctggtttattgctgataaatctggagccggtgagcgtgggtctcgcggtatcattgcagcactggggccagatggtaagccctcccgtatcgtagttatctacacgacggggagtcaggcaactatggatgaacgaaatagacagatcgctgagataggtgcctcactgattaagcattggtaactgtcagaccaagtttactcatatatactttagattgatttaaaacttcatttttaatttaaaaggatctaggtgaagatcctttttgataatctcatgaccaaaatcccttaacgtgagttttcgttccactgagcgtcagaccccgtagaaaagatcaaaggatcttcttgagatcctttttttctgcgcgtaatctgctgcttgcaaacaaaaaaaccaccgctaccagcggtggtttgtttgccggatcaagagctaccaactctttttccgaaggtaactggcttcagcagagcgcagataccaaatactgtccttctagtgtagccgtagttaggccaccacttcaagaactctgtagcaccgcctacatacctcgctctgctaatcctgttaccagtggctgctgccagtggcgataagtcgtgtcttaccgggttggactcaagacgatagttaccggataaggcgcagcggtcgggctgaacggggggttcgtgcacacagcccagcttggagcgaacgacctacaccgaactgagatacctacagcgtgagctatgagaaagcgccacgcttcccgaagggagaaaggcggacaggtatccggtaagcggcagggtcggaacaggagagcgcacgagggagcttccagggggaaacgcctggtatctttatagtcctgtcgggtttcgccacctctgacttgagcgtcgatttttgtgatgctcgtcaggggggcggagcctatggaaaaacgccagcaacgcggcctttttacggttcctggccttttgctggccttttgctcacatgttctttcctgcgttatcccctgattctgtggataaccgtattaccgcctttgagtgagctgataccgctcgccgcagccgaacgaccgagcgcagcgagtcagtgagcgaggaagcggaagagcgcccaatacgcaaaccgcctctccccgcgcgttggccgattcattaatgcagctggcacgacaggtttcccgactggaaagcgggcagtgagcgcaacgcaattaatgtgagttagctcactcattaggcaccccaggctttacactttatgcttccggctcgtatgttgtgtggaattgtgagcggataacaatttcacacaggaaacagcatatgcaaacaagcattactctgacatccaacgcatccggtacgtttgacggttactattacgaactctggaaggatactggcaatacaacaatgacggtctacactcaaggtcgcttttcctgccagtggtcgaacatcaataacgcgttgtttaggaccgggaagaaatacaaccagaattggcagtctcttggcacaatccggatcacgtactctgcgacttacaacccaaacgggaactcctacttgtgtatctatggctggtctaccaacccattggtcgagttctacatcgttgagtcctgggggaactggagaccgcctggtgccacgtccctgggccaagtgacaatcgatggcgggacctacgacatctataggacgacacgcgtcaaccagccttgcgtcgcgcctgagacactgattattactgagaatgggacaaaggagatcggggaggtcgtggagcggtggatgaaggagctgggcgagatcgagtacgacgatggcatttcgtactctccggccttcgagaaggttgcgtccctgaacggcgggaaggtgaagatgctcccggtccgcagggtttggaagctgaggagcccaggcaagatgatcaagattcgctcagagtccgggaagcagatcaccgtcacgccagagacaaagctcctgactatcattgacggctcgctggagtgggtggaggctcgcaagctgaagaaggggaactacgttgcggtggtcaataaggagaggagcatcgtgcctattggcgacttcctcgctaagctcctgaagttctacggggtcgagctgaacctcaatgaggctgttgagcgcgaccaggccaggaagctcctggagaccctgaagtctaagggcctctcagatgtcacgatcgagattccagagaagctccggcgcttcatcaagtgcgaccgcgtgcgctacgtggatctggttgagatgctctccagcatggagggcgagctgaaggaggaggtcatgctcctgctctccgacgtgggggatatccacgaggtcattcaggagcggctgaaggagatcggcaagattctggagagcgacgcgtcgtgggagaggatcgctgaggtggaggaggttgtgcgggatggccatgtctacgatctcacagtggagggctctcattctttcattgctaatggcttcgtggttcataactccattgtggggacagccacgttcgatcagtactggagcgtgcgcacctctaagcggacttcaggaacagtgaccgtgaccgatcacttccgcgcctgggcgaaccggggcctgaacctcggcacaatagaccaaattacattgtgcgtggagggttaccaaagctctggatcagccaacatcacccagaacaccttctctcagggctcttcttccggcagttcgggtggctcatccggctccacaacgactactcgcatcgagtgtgagaacatgtccttgtccggaccctacgttagcaggatcaccaatccctttaatggtattgcgctgtacgccaacggagacacagcccgcgctaccgttaacttccccgcaagtcgcaactacaatttccgcctgcggggttgcggcaacaacaataatcttgcccgtgtggacctgaggatcgacggacggaccgtcgggaccttttattaccagggcacatacccctgggaggccccaattgacaatgtttatgtcagtgcggggagtcatacagtcgaaatcactgttactgcggataacggcacatgggacgtgtatgccgactacctggtgatacagtgactcgagggggggcccggtacccaattcgccctatagtgagtcgtattacaattcactggccgtcgttttacaacgtcgtgactgggaaaaccctggcgttacccaacttaatcgccttgcagcacatccccctttcgccagctggcgtaatagcgaagaggcccgcaccgatcgcccttcccaacagttgcgcagcctgaatggcgaatggaaattgtaagcgttaatattttgttaaaattcgcgttaaatttttgttaaatcagctcattttttaaccaataggccgaaatcggcaaaatcccttataaatcaaaagaatagaccgagatagggttgagtgttgttccagtttggaacaagagtccactattaaagaacgtggactccaacgtcaaagggcgaaaaaccgtctatcagggcgatggcccactacgtgaaccatcaccctaatcaagttttttggggtcgaggtgccgtaaagcactaaatcggaaccctaaagggagcccccgatttagagcttgacggggaaagccggcgaacgtggcgagaaaggaagggaagaaagcgaaaggagcgggcgctagggcgctggcaagtgtagcggtcacgctgcgcgtaaccaccacacccgccgcgcttaatgcgccgctacagggcgcgtcaggtg

SEQ ID NO: 3081 - DNA, 5012 bp, Artificial Sequence
  Synthetic Construct, AS-81 intein modified protein encoding nucleic acids in pBluescript
gcacttttcggggaaatgtgcgcggaacccctatttgtttatttttctaaatacattcaaatatgtatccgctcatgagacaataaccctgataaatgcttcaataatattgaaaaaggaagagtatgagtattcaacatttccgtgtcgcccttattcccttttttgcggcattttgccttcctgtttttgctcacccagaaacgctggtgaaagtaaaagatgctgaagatcagttgggtgcacgagtgggttacatcgaactggatctcaacagcggtaagatccttgagagttttcgccccgaagaacgttttccaatgatgagcacttttaaagttctgctatgtggcgcggtattatcccgtattgacgccgggcaagagcaactcggtcgccgcatacactattctcagaatgacttggttgagtactcaccagtcacagaaaagcatcttacggatggcatgacagtaagagaattatgcagtgctgccataaccatgagtgataacactgcggccaacttacttctgacaacgatcggaggaccgaaggagctaaccgcttttttgcacaacatgggggatcatgtaactcgccttgatcgttgggaaccggagctgaatgaagccataccaaacgacgagcgtgacaccacgatgcctgtagcaatggcaacaacgttgcgcaaactattaactggcgaactacttactctagcttcccggcaacaattaatagactggatggaggcggataaagttgcaggaccacttctgcgctcggcccttccggctggctggtttattgctgataaatctggagccggtgagcgtgggtctcgcggtatcattgcagcactggggccagatggtaagccctcccgtatcgtagttatctacacgacggggagtcaggcaactatggatgaacgaaatagacagatcgctgagataggtgcctcactgattaagcattggtaactgtcagaccaagtttactcatatatactttagattgatttaaaacttcatttttaatttaaaaggatctaggtgaagatcctttttgataatctcatgaccaaaatcccttaacgtgagttttcgttccactgagcgtcagaccccgtagaaaagatcaaaggatcttcttgagatcctttttttctgcgcgtaatctgctgcttgcaaacaaaaaaaccaccgctaccagcggtggtttgtttgccggatcaagagctaccaactctttttccgaaggtaactggcttcagcagagcgcagataccaaatactgtccttctagtgtagccgtagttaggccaccacttcaagaactctgtagcaccgcctacatacctcgctctgctaatcctgttaccagtggctgctgccagtggcgataagtcgtgtcttaccgggttggactcaagacgatagttaccggataaggcgcagcggtcgggctgaacggggggttcgtgcacacagcccagcttggagcgaacgacctacaccgaactgagatacctacagcgtgagctatgagaaagcgccacgcttcccgaagggagaaaggcggacaggtatccggtaagcggcagggtcggaacaggagagcgcacgagggagcttccagggggaaacgcctggtatctttatagtcctgtcgggtttcgccacctctgacttgagcgtcgatttttgtgatgctcgtcaggggggcggagcctatggaaaaacgccagcaacgcggcctttttacggttcctggccttttgctggccttttgctcacatgttctttcctgcgttatcccctgattctgtggataaccgtattaccgcctttgagtgagctgataccgctcgccgcagccgaacgaccgagcgcagcgagtcagtgagcgaggaagcggaagagcgcccaatacgcaaaccgcctctccccgcgcgttggccgattcattaatgcagctggcacgacaggtttcccgactggaaagcgggcagtgagcgcaacgcaattaatgtgagttagctcactcattaggcaccccaggctttacactttatgcttccggctcgtatgttgtgtggaattgtgagcggataacaatttcacacaggaaacagcatatgcaaacaagcattactctgacatccaacgcatccggtacgtttgacggttactattacgaactctggaaggatactggcaatacaacaatgacggtctacactcaaggtcgcttttcctgccagtggtcgaacatcaataacgcgttgtttaggaccgggaagaaatacaaccagaattggcagtctcttggcacaatccggatcacgtactctgcgacttacaacccaaacgggaactcctacttgtgtatctatggctggtctaccaacccattggtcgagttctacatcgttgagtcctgggggaactggagaccgcctggtgccacgtccctgggccaagtgacaatcgatggcgggacctacgacatctataggacgacacgcgtcaaccagccttgcctcctccctgatgagaaggtcgtggttccctcggtcgggttcgtgacactcaaggagctgttcgagacggcttccaaggtcgtggagcgcgacgatgagaaggagatcagggagctcgacgagcggattaccagcgttaacggcgatgggaagacgggcctggtcaaggcctcctacgtgtggaaggttaggcacaagggcaaggtcatccgggtcaagctcaagaattggcacggcgttacagtgactccggagcatcccttcctcaccacgaaggggtggaagagggctgaccagctgaggccaggcgattacgtcgcggttcctaggttcatccatggcaacgaggacgagaagattttcctctcctacgtgaaggtcaagaagtctggcgaggagtggaaggagtacttctacctggcgggcaggaaggggaacatcgatgtcaatctcctgttcgttgctccaaagcgctacgtggtcgagttcctccgggggtacttcgaggagcgctccgaggtcaagggcgagagcgttatcgtggaggctcgggagctggtggagcctctcagcctggctctcctgaggttcggcatcttctctaagattcaggggtcaaagctcatcgtcaccggcaagcgcaacctggaggccttcaaggactacattggcttcaaggatgagagggagaaggccctggaggaggcgatcgagaaggtgaagggctccgaggtctacccgatcttcgaggagattcgcaggctccgcctcctgttcgggttcacaagggaggagctgggctcatacgctaagtacgagaactccgaggccccgacttacgaggagctcatggagatcctggacttcattgagagggggtcccccagcctctcgaagaagatcgcgattctggagggcaagctgaaggctgagctcagggtgctggaggaggagggcctgatcaaggacgggaagctcaccccactgggcagggagctcctggaggtctggcggaaccgcgagttcgattccaaggacgtcgattacatccggaacattgcggagacgctggtgttcatccccgttgagaatgtggaggaggaggagtacgacggctacgtttacgatctcactacggagactcataacttcattgctaatggcatcctcgttcataattccattgtggggacagccacgttcgatcagtactggagcgtgcgcacctctaagcggacttcaggaacagtgaccgtgaccgatcacttccgcgcctgggcgaaccggggcctgaacctcggcacaatagaccaaattacattgtgcgtggagggttaccaaagctctggatcagccaacatcacccagaacaccttctctcagggctcttcttccggcagttcgggtggctcatccggctccacaacgactactcgcatcgagtgtgagaacatgtccttgtccggaccctacgttagcaggatcaccaatccctttaatggtattgcgctgtacgccaacggagacacagcccgcgctaccgttaacttccccgcaagtcgcaactacaatttccgcctgcggggttgcggcaacaacaataatcttgcccgtgtggacctgaggatcgacggacggaccgtcgggaccttttattaccagggcacatacccctgggaggccccaattgacaatgtttatgtcagtgcggggagtcatacagtcgaaatcactgttactgcggataacggcacatgggacgtgtatgccgactacctggtgatacagtgactcgagggggggcccggtacccaattcgccctatagtgagtcgtattacaattcactggccgtcgttttacaacgtcgtgactgggaaaaccctggcgttacccaacttaatcgccttgcagcacatccccctttcgccagctggcgtaatagcgaagaggcccgcaccgatcgcccttcccaacagttgcgcagcctgaatggcgaatggaaattgtaagcgttaatattttgttaaaattcgcgttaaatttttgttaaatcagctcattttttaaccaataggccgaaatcggcaaaatcccttataaatcaaaagaatagaccgagatagggttgagtgttgttccagtttggaacaagagtccactattaaagaacgtggactccaacgtcaaagggcgaaaaaccgtctatcagggcgatggcccactacgtgaaccatcaccctaatcaagttttttggggtcgaggtgccgtaaagcactaaatcggaaccctaaagggagcccccgatttagagcttgacggggaaagccggcgaacgtggcgagaaaggaagggaagaaagcgaaaggagcgggcgctagggcgctggcaagtgtagcggtcacgctgcgcgtaaccaccacacccgccgcgcttaatgcgccgctacagggcgcgtcaggtg

SEQ ID NO: 3082 - DNA, 4418 bp, Artificial Sequence
  Synthetic Construct, AS-82 intein modified protein encoding nucleic acids in pBluescript
gcacttttcggggaaatgtgcgcggaacccctatttgtttatttttctaaatacattcaaatatgtatccgctcatgagacaataaccctgataaatgcttcaataatattgaaaaaggaagagtatgagtattcaacatttccgtgtcgcccttattcccttttttgcggcattttgccttcctgtttttgctcacccagaaacgctggtgaaagtaaaagatgctgaagatcagttgggtgcacgagtgggttacatcgaactggatctcaacagcggtaagatccttgagagttttcgccccgaagaacgttttccaatgatgagcacttttaaagttctgctatgtggcgcggtattatcccgtattgacgccgggcaagagcaactcggtcgccgcatacactattctcagaatgacttggttgagtactcaccagtcacagaaaagcatcttacggatggcatgacagtaagagaattatgcagtgctgccataaccatgagtgataacactgcggccaacttacttctgacaacgatcggaggaccgaaggagctaaccgcttttttgcacaacatgggggatcatgtaactcgccttgatcgttgggaaccggagctgaatgaagccataccaaacgacgagcgtgacaccacgatgcctgtagcaatggcaacaacgttgcgcaaactattaactggcgaactacttactctagcttcccggcaacaattaatagactggatggaggcggataaagttgcaggaccacttctgcgctcggcccttccggctggctggtttattgctgataaatctggagccggtgagcgtgggtctcgcggtatcattgcagcactggggccagatggtaagccctcccgtatcgtagttatctacacgacggggagtcaggcaactatggatgaacgaaatagacagatcgctgagataggtgcctcactgattaagcattggtaactgtcagaccaagtttactcatatatactttagattgatttaaaacttcatttttaatttaaaaggatctaggtgaagatcctttttgataatctcatgaccaaaatcccttaacgtgagttttcgttccactgagcgtcagaccccgtagaaaagatcaaaggatcttcttgagatcctttttttctgcgcgtaatctgctgcttgcaaacaaaaaaaccaccgctaccagcggtggtttgtttgccggatcaagagctaccaactctttttccgaaggtaactggcttcagcagagcgcagataccaaatactgtccttctagtgtagccgtagttaggccaccacttcaagaactctgtagcaccgcctacatacctcgctctgctaatcctgttaccagtggctgctgccagtggcgataagtcgtgtcttaccgggttggactcaagacgatagttaccggataaggcgcagcggtcgggctgaacggggggttcgtgcacacagcccagcttggagcgaacgacctacaccgaactgagatacctacagcgtgagctatgagaaagcgccacgcttcccgaagggagaaaggcggacaggtatccggtaagcggcagggtcggaacaggagagcgcacgagggagcttccagggggaaacgcctggtatctttatagtcctgtcgggtttcgccacctctgacttgagcgtcgatttttgtgatgctcgtcaggggggcggagcctatggaaaaacgccagcaacgcggcctttttacggttcctggccttttgctggccttttgctcacatgttctttcctgcgttatcccctgattctgtggataaccgtattaccgcctttgagtgagctgataccgctcgccgcagccgaacgaccgagcgcagcgagtcagtgagcgaggaagcggaagagcgcccaatacgcaaaccgcctctccccgcgcgttggccgattcattaatgcagctggcacgacaggtttcccgactggaaagcgggcagtgagcgcaacgcaattaatgtgagttagctcactcattaggcaccccaggctttacactttatgcttccggctcgtatgttgtgtggaattgtgagcggataacaatttcacacaggaaacagcatatgcaaacaagcattactctgacatccaacgcatccggtacgtttgacggttactattacgaactctggaaggatactggcaatacaacaatgacggtctacactcaaggtcgcttttcctgccagtggtcgaacatcaataacgcgttgtttaggaccgggaagaaatacaaccagaattggcagtctcttggcacaatccggatcacgtactctgcgacttacaacccaaacgggaactcctacttgtgtatctatggctggtctaccaacccattggtcgagttctacatcgttgagtcctgggggaactggagaccgcctggtgccacgtccctgggccaagtgacaatcgatggcgggacctacgacatctataggacgacacgcgtcaaccagcctgcgctctactacttctctgagattcagctccctaacggcaaggagttcatcggcaagctcgtggatgagctgttcgagaagtaccatgacaagatcggcaagtacaaggatatggagtatgtggagctcaacgaggaggacacattcgaggtcatctcaattgggccagatctgtccgctaggaggcacaaagtgactcatgtctggcggcgcaaggttaaggacggcgagaagctcgtgaagatcaggaccgctagcgggaaggagctcgtgctgacgcaggaccacccggttttcgtgctcctgggcagggacgtcgctaggagggatgctggcaacgtcaaggttggggacgagattgcggtgctcaatacgcggcccgatttctcggtcctgtctccgcccgctatgccagagctcctgtctgagcctttcaattacgagctgtccagcatcggcgacgtcgcttgggatgaggtggtcgaggttgacgagattgatgccaagggcctcggggtggagtacctgtacgatctcacagtggatatcaatcataactacgttgctaatggcattgtcgtttctaattccattgtggggacagccacgttcgatcagtactggagcgtgcgcacctctaagcggacttcaggaacagtgaccgtgaccgatcacttccgcgcctgggcgaaccggggcctgaacctcggcacaatagaccaaattacattgtgcgtggagggttaccaaagctctggatcagccaacatcacccagaacaccttctctcagggctcttcttccggcagttcgggtggctcatccggctccacaacgactactcgcatcgagtgtgagaacatgtccttgtccggaccctacgttagcaggatcaccaatccctttaatggtattgcgctgtacgccaacggagacacagcccgcgctaccgttaacttccccgcaagtcgcaactacaatttccgcctgcggggttgcggcaacaacaataatcttgcccgtgtggacctgaggatcgacggacggaccgtcgggaccttttattaccagggcacatacccctgggaggccccaattgacaatgtttatgtcagtgcggggagtcatacagtcgaaatcactgttactgcggataacggcacatgggacgtgtatgccgactacctggtgatacagtgactcgagggggggcccggtacccaattcgccctatagtgagtcgtattacaattcactggccgtcgttttacaacgtcgtgactgggaaaaccctggcgttacccaacttaatcgccttgcagcacatccccctttcgccagctggcgtaatagcgaagaggcccgcaccgatcgcccttcccaacagttgcgcagcctgaatggcgaatggaaattgtaagcgttaatattttgttaaaattcgcgttaaatttttgttaaatcagctcattttttaaccaataggccgaaatcggcaaaatcccttataaatcaaaagaatagaccgagatagggttgagtgttgttccagtttggaacaagagtccactattaaagaacgtggactccaacgtcaaagggcgaaaaaccgtctatcagggcgatggcccactacgtgaaccatcaccctaatcaagttttttggggtcgaggtgccgtaaagcactaaatcggaaccctaaagggagcccccgatttagagcttgacggggaaagccggcgaacgtggcgagaaaggaagggaagaaagcgaaaggagcgggcgctagggcgctggcaagtgtagcggtcacgctgcgcgtaaccaccacacccgccgcgcttaatgcgccgctacagggcgcgtcaggtg

SEQ ID NO: 3083 - DNA, 4829 bp, Artificial Sequence
  Synthetic Construct, AS-83 intein modified protein encoding nucleic acids in pBluescript
gcacttttcggggaaatgtgcgcggaacccctatttgtttatttttctaaatacattcaaatatgtatccgctcatgagacaataaccctgataaatgcttcaataatattgaaaaaggaagagtatgagtattcaacatttccgtgtcgcccttattcccttttttgcggcattttgccttcctgtttttgctcacccagaaacgctggtgaaagtaaaagatgctgaagatcagttgggtgcacgagtgggttacatcgaactggatctcaacagcggtaagatccttgagagttttcgccccgaagaacgttttccaatgatgagcacttttaaagttctgctatgtggcgcggtattatcccgtattgacgccgggcaagagcaactcggtcgccgcatacactattctcagaatgacttggttgagtactcaccagtcacagaaaagcatcttacggatggcatgacagtaagagaattatgcagtgctgccataaccatgagtgataacactgcggccaacttacttctgacaacgatcggaggaccgaaggagctaaccgcttttttgcacaacatgggggatcatgtaactcgccttgatcgttgggaaccggagctgaatgaagccataccaaacgacgagcgtgacaccacgatgcctgtagcaatggcaacaacgttgcgcaaactattaactggcgaactacttactctagcttcccggcaacaattaatagactggatggaggcggataaagttgcaggaccacttctgcgctcggcccttccggctggctggtttattgctgataaatctggagccggtgagcgtgggtctcgcggtatcattgcagcactggggccagatggtaagccctcccgtatcgtagttatctacacgacggggagtcaggcaactatggatgaacgaaatagacagatcgctgagataggtgcctcactgattaagcattggtaactgtcagaccaagtttactcatatatactttagattgatttaaaacttcatttttaatttaaaaggatctaggtgaagatcctttttgataatctcatgaccaaaatcccttaacgtgagttttcgttccactgagcgtcagaccccgtagaaaagatcaaaggatcttcttgagatcctttttttctgcgcgtaatctgctgcttgcaaacaaaaaaaccaccgctaccagcggtggtttgtttgccggatcaagagctaccaactctttttccgaaggtaactggcttcagcagagcgcagataccaaatactgtccttctagtgtagccgtagttaggccaccacttcaagaactctgtagcaccgcctacatacctcgctctgctaatcctgttaccagtggctgctgccagtggcgataagtcgtgtcttaccgggttggactcaagacgatagttaccggataaggcgcagcggtcgggctgaacggggggttcgtgcacacagcccagcttggagcgaacgacctacaccgaactgagatacctacagcgtgagctatgagaaagcgccacgcttcccgaagggagaaaggcggacaggtatccggtaagcggcagggtcggaacaggagagcgcacgagggagcttccagggggaaacgcctggtatctttatagtcctgtcgggtttcgccacctctgacttgagcgtcgatttttgtgatgctcgtcaggggggcggagcctatggaaaaacgccagcaacgcggcctttttacggttcctggccttttgctggccttttgctcacatgttctttcctgcgttatcccctgattctgtggataaccgtattaccgcctttgagtgagctgataccgctcgccgcagccgaacgaccgagcgcagcgagtcagtgagcgaggaagcggaagagcgcccaatacgcaaaccgcctctccccgcgcgttggccgattcattaatgcagctggcacgacaggtttcccgactggaaagcgggcagtgagcgcaacgcaattaatgtgagttagctcactcattaggcaccccaggctttacactttatgcttccggctcgtatgttgtgtggaattgtgagcggataacaatttcacacaggaaacagcatatgcaaacaagcattactctgacatccaacgcatccggtacgtttgacggttactattacgaactctggaaggatactggcaatacaacaatgacggtctacactcaaggtcgcttttcctgccagtggtcgaacatcaataacgcgttgtttaggaccgggaagaaatacaaccagaattggcagtctcttggcacaatccggatcacgtactctgcgacttacaacccaaacgggaactcctacttgtgtatctatggctggtctaccaacccattggtcgagttctacatcgttgagtcctgggggaactggagaccgcctggtgccacgtccctgggccaagtgacaatcgatggcgggacctacgacatctataggacgacacgcgtcaaccagccttgcttcagcggggaggagacagtcgttattcgggagaatggggaggtcaaggtgctcaggctcaaggatttcgtggagaaggctctggagaagccaagcggcgaggggctggacggcgatgtgaaggtggtctaccacgacttccgcaacgagaatgtcgaggttctcaccaaggatggcttcacgaagctcctgtacgctaacaagaggatcgggaagcagaagctccgcagggttgtgaatctggagaaggactactggttcgctctcacccccgaccataaggtctacaccacggatggcctgaaggaggccggggagatcacagagaaggacgagctcatctctgtcccaattactgttttcgattgcgaggacgaggatctgaagaagatcggcctcctgcctctcacctcggacgatgagcggctgcgcaagatcgccacgctcatgggcattctgttcaacggcgggtctatcgacgagggcctcggggtgctcacactgaagtccgagaggagcgttatcgagaagttcgtgattaccctcaaggagctgttcggcaagttcgagtacgagatcattaaggaggagaacacaatcctgaagactagggacccgcggatcattaagttcctcgtcggcctgggggctccaattgagggcaaggatctcaagatgccatggtgggttaagctgaagccttcactcttcctggccttcctggagggcttccgggctcacatcgtggagcagctggtcgacgatccgaacaagaatctccccttcttccaggagctgtcctggtacctcggcctgttcgggatcaaggcggacattaaggttgaggaagtgggcgacaagcataagatcattttcgatgctgggcgcctcgacgtcgataagcagttcatcgagacgtgggaggacgtggaggtcacctacaacctcactacggagaagggcaatctgctcgccaatgggctcttcgttaagaactccattgtggggacagccacgttcgatcagtactggagcgtgcgcacctctaagcggacttcaggaacagtgaccgtgaccgatcacttccgcgcctgggcgaaccggggcctgaacctcggcacaatagaccaaattacattgtgcgtggagggttaccaaagctctggatcagccaacatcacccagaacaccttctctcagggctcttcttccggcagttcgggtggctcatccggctccacaacgactactcgcatcgagtgtgagaacatgtccttgtccggaccctacgttagcaggatcaccaatccctttaatggtattgcgctgtacgccaacggagacacagcccgcgctaccgttaacttccccgcaagtcgcaactacaatttccgcctgcggggttgcggcaacaacaataatcttgcccgtgtggacctgaggatcgacggacggaccgtcgggaccttttattaccagggcacatacccctgggaggccccaattgacaatgtttatgtcagtgcggggagtcatacagtcgaaatcactgttactgcggataacggcacatgggacgtgtatgccgactacctggtgatacagtgactcgagggggggcccggtacccaattcgccctatagtgagtcgtattacaattcactggccgtcgttttacaacgtcgtgactgggaaaaccctggcgttacccaacttaatcgccttgcagcacatccccctttcgccagctggcgtaatagcgaagaggcccgcaccgatcgcccttcccaacagttgcgcagcctgaatggcgaatggaaattgtaagcgttaatattttgttaaaattcgcgttaaatttttgttaaatcagctcattttttaaccaataggccgaaatcggcaaaatcccttataaatcaaaagaatagaccgagatagggttgagtgttgttccagtttggaacaagagtccactattaaagaacgtggactccaacgtcaaagggcgaaaaaccgtctatcagggcgatggcccactacgtgaaccatcaccctaatcaagttttttggggtcgaggtgccgtaaagcactaaatcggaaccctaaagggagcccccgatttagagcttgacggggaaagccggcgaacgtggcgagaaaggaagggaagaaagcgaaaggagcgggcgctagggcgctggcaagtgtagcggtcacgctgcgcgtaaccaccacacccgccgcgcttaatgcgccgctacagggcgcgtcaggtg

SEQ ID NO: 3084 - DNA, 5195 bp, Artificial Sequence
  Synthetic Construct, AS-84 intein modified protein encoding nucleic acids in pBluescript
gcacttttcggggaaatgtgcgcggaacccctatttgtttatttttctaaatacattcaaatatgtatccgctcatgagacaataaccctgataaatgcttcaataatattgaaaaaggaagagtatgagtattcaacatttccgtgtcgcccttattcccttttttgcggcattttgccttcctgtttttgctcacccagaaacgctggtgaaagtaaaagatgctgaagatcagttgggtgcacgagtgggttacatcgaactggatctcaacagcggtaagatccttgagagttttcgccccgaagaacgttttccaatgatgagcacttttaaagttctgctatgtggcgcggtattatcccgtattgacgccgggcaagagcaactcggtcgccgcatacactattctcagaatgacttggttgagtactcaccagtcacagaaaagcatcttacggatggcatgacagtaagagaattatgcagtgctgccataaccatgagtgataacactgcggccaacttacttctgacaacgatcggaggaccgaaggagctaaccgcttttttgcacaacatgggggatcatgtaactcgccttgatcgttgggaaccggagctgaatgaagccataccaaacgacgagcgtgacaccacgatgcctgtagcaatggcaacaacgttgcgcaaactattaactggcgaactacttactctagcttcccggcaacaattaatagactggatggaggcggataaagttgcaggaccacttctgcgctcggcccttccggctggctggtttattgctgataaatctggagccggtgagcgtgggtctcgcggtatcattgcagcactggggccagatggtaagccctcccgtatcgtagttatctacacgacggggagtcaggcaactatggatgaacgaaatagacagatcgctgagataggtgcctcactgattaagcattggtaactgtcagaccaagtttactcatatatactttagattgatttaaaacttcatttttaatttaaaaggatctaggtgaagatcctttttgataatctcatgaccaaaatcccttaacgtgagttttcgttccactgagcgtcagaccccgtagaaaagatcaaaggatcttcttgagatcctttttttctgcgcgtaatctgctgcttgcaaacaaaaaaaccaccgctaccagcggtggtttgtttgccggatcaagagctaccaactctttttccgaaggtaactggcttcagcagagcgcagataccaaatactgtccttctagtgtagccgtagttaggccaccacttcaagaactctgtagcaccgcctacatacctcgctctgctaatcctgttaccagtggctgctgccagtggcgataagtcgtgtcttaccgggttggactcaagacgatagttaccggataaggcgcagcggtcgggctgaacggggggttcgtgcacacagcccagcttggagcgaacgacctacaccgaactgagatacctacagcgtgagctatgagaaagcgccacgcttcccgaagggagaaaggcggacaggtatccggtaagcggcagggtcggaacaggagagcgcacgagggagcttccagggggaaacgcctggtatctttatagtcctgtcgggtttcgccacctctgacttgagcgtcgatttttgtgatgctcgtcaggggggcggagcctatggaaaaacgccagcaacgcggcctttttacggttcctggccttttgctggccttttgctcacatgttctttcctgcgttatcccctgattctgtggataaccgtattaccgcctttgagtgagctgataccgctcgccgcagccgaacgaccgagcgcagcgagtcagtgagcgaggaagcggaagagcgcccaatacgcaaaccgcctctccccgcgcgttggccgattcattaatgcagctggcacgacaggtttcccgactggaaagcgggcagtgagcgcaacgcaattaatgtgagttagctcactcattaggcaccccaggctttacactttatgcttccggctcgtatgttgtgtggaattgtgagcggataacaatttcacacaggaaacagcatatgcaaacaagcattactctgacatccaacgcatccggtacgtttgacggttactattacgaactctggaaggatactggcaatacaacaatgacggtctacactcaaggtcgcttttcctgccagtggtcgaacatcaataacgcgttgtttaggaccgggaagaaatacaaccagaattggcagtctcttggcacaatccggatcacgtactctgcgacttacaacccaaacgggaactcctacttgtgtatctatggctggtctaccaacccattggtcgagttctacatcgttgagtcctgggggaactggagaccgcctggtgccacgtccctgggccaagtgacaatcgatggcgggacctacgacatctataggacgacacgcgtcaaccagccttgcttcccccctactgaggaggcggttttcaagttcggggataaggttaagatcgctactttcgaggaggtcgctaagaatttcaagttcgagcacaaggtcgagatcgacggcttcaagggggagtacagcattcccaacgacctctacgtgctgaccttcaatgatggcaaggccgagtggacccgggtcacgaagttcctccgcaggaagcacgaggggaagatccgcgtcattaagaccaagacgggcaggacgatcaggaccacgccagagcataagttcttcgtttacaaggacggggagctggtgaagaagagggctgacgagctggagccaggcgatgagctggtgctcctgtggcggttcgagtccgaggagacactcactgagatcaacctcctggaggctttcaaggacctgccacaggaggagaaggagaaggtctacgttcgggggattaaggacctcgatctgacgcctctcaaggagaagtacggcgacaaggtctactactgggcgaggcaggattcgatgccgctctctgtgttctacgagctcaacgtcgacctggataaggagttcaggctgggccgggacgctacaacttacgagctcccatctaagctgaagatcacaccttcactcgccaagctgattggctacttcgtgtcagacgggaactactccgacaaggatctccgcatcactgtgggccacgaggatgtcgagaaggagatcgttaatattctggaggagctcggcctgccatactcgttcctggagtgggaggggaagaccaagcagatcgttattggctctcgcctcctgaggctggtcttcaagcatgttttcaagatcccagagggggctccaaacaagaggctcccggagggcttcctgtccttccccttcgaggctaaggtggctctcctgagcggcctcttcaatggcgacggctacgtggtgcgcggcgagcaccatctgtcgatcgggtacgcgtccacaagcaagggcctcatcagggatattctgtacctcctggcttccctgggcattttcgcccgggtgtaccgcgtccctaaggagaagatgaagggggccaaccacgacctctacaagctgtacatcgcgggcaccgatctcgttcgcctggtggagctcctggagctcagggagggccatcgggagaagctgggcgagatcgggaatcgcaagccggcgagggtgaagaagatcgctgacttctacattgacgttgtggatgaggtcagcgaggaggagtactcgggctacgtttacgatctggaggtggagaatgaggggcatagcttcgttgctgcggatggcatcctcgtttcaaattccattgtggggacagccacgttcgatcagtactggagcgtgcgcacctctaagcggacttcaggaacagtgaccgtgaccgatcacttccgcgcctgggcgaaccggggcctgaacctcggcacaatagaccaaattacattgtgcgtggagggttaccaaagctctggatcagccaacatcacccagaacaccttctctcagggctcttcttccggcagttcgggtggctcatccggctccacaacgactactcgcatcgagtgtgagaacatgtccttgtccggaccctacgttagcaggatcaccaatccctttaatggtattgcgctgtacgccaacggagacacagcccgcgctaccgttaacttccccgcaagtcgcaactacaatttccgcctgcggggttgcggcaacaacaataatcttgcccgtgtggacctgaggatcgacggacggaccgtcgggaccttttattaccagggcacatacccctgggaggccccaattgacaatgtttatgtcagtgcggggagtcatacagtcgaaatcactgttactgcggataacggcacatgggacgtgtatgccgactacctggtgatacagtgactcgagggggggcccggtacccaattcgccctatagtgagtcgtattacaattcactggccgtcgttttacaacgtcgtgactgggaaaaccctggcgttacccaacttaatcgccttgcagcacatccccctttcgccagctggcgtaatagcgaagaggcccgcaccgatcgcccttcccaacagttgcgcagcctgaatggcgaatggaaattgtaagcgttaatattttgttaaaattcgcgttaaatttttgttaaatcagctcattttttaaccaataggccgaaatcggcaaaatcccttataaatcaaaagaatagaccgagatagggttgagtgttgttccagtttggaacaagagtccactattaaagaacgtggactccaacgtcaaagggcgaaaaaccgtctatcagggcgatggcccactacgtgaaccatcaccctaatcaagttttttggggtcgaggtgccgtaaagcactaaatcggaaccctaaagggagcccccgatttagagcttgacggggaaagccggcgaacgtggcgagaaaggaagggaagaaagcgaaaggagcgggcgctagggcgctggcaagtgtagcggtcacgctgcgcgtaaccaccacacccgccgcgcttaatgcgccgctacagggcgcgtcaggtg

SEQ ID NO: 3085 - DNA, 4385 bp, Artificial Sequence
  Synthetic Construct, AS-85 intein modified protein encoding nucleic acids in pBluescript
gcacttttcggggaaatgtgcgcggaacccctatttgtttatttttctaaatacattcaaatatgtatccgctcatgagacaataaccctgataaatgcttcaataatattgaaaaaggaagagtatgagtattcaacatttccgtgtcgcccttattcccttttttgcggcattttgccttcctgtttttgctcacccagaaacgctggtgaaagtaaaagatgctgaagatcagttgggtgcacgagtgggttacatcgaactggatctcaacagcggtaagatccttgagagttttcgccccgaagaacgttttccaatgatgagcacttttaaagttctgctatgtggcgcggtattatcccgtattgacgccgggcaagagcaactcggtcgccgcatacactattctcagaatgacttggttgagtactcaccagtcacagaaaagcatcttacggatggcatgacagtaagagaattatgcagtgctgccataaccatgagtgataacactgcggccaacttacttctgacaacgatcggaggaccgaaggagctaaccgcttttttgcacaacatgggggatcatgtaactcgccttgatcgttgggaaccggagctgaatgaagccataccaaacgacgagcgtgacaccacgatgcctgtagcaatggcaacaacgttgcgcaaactattaactggcgaactacttactctagcttcccggcaacaattaatagactggatggaggcggataaagttgcaggaccacttctgcgctcggcccttccggctggctggtttattgctgataaatctggagccggtgagcgtgggtctcgcggtatcattgcagcactggggccagatggtaagccctcccgtatcgtagttatctacacgacggggagtcaggcaactatggatgaacgaaatagacagatcgctgagataggtgcctcactgattaagcattggtaactgtcagaccaagtttactcatatatactttagattgatttaaaacttcatttttaatttaaaaggatctaggtgaagatcctttttgataatctcatgaccaaaatcccttaacgtgagttttcgttccactgagcgtcagaccccgtagaaaagatcaaaggatcttcttgagatcctttttttctgcgcgtaatctgctgcttgcaaacaaaaaaaccaccgctaccagcggtggtttgtttgccggatcaagagctaccaactctttttccgaaggtaactggcttcagcagagcgcagataccaaatactgtccttctagtgtagccgtagttaggccaccacttcaagaactctgtagcaccgcctacatacctcgctctgctaatcctgttaccagtggctgctgccagtggcgataagtcgtgtcttaccgggttggactcaagacgatagttaccggataaggcgcagcggtcgggctgaacggggggttcgtgcacacagcccagcttggagcgaacgacctacaccgaactgagatacctacagcgtgagctatgagaaagcgccacgcttcccgaagggagaaaggcggacaggtatccggtaagcggcagggtcggaacaggagagcgcacgagggagcttccagggggaaacgcctggtatctttatagtcctgtcgggtttcgccacctctgacttgagcgtcgatttttgtgatgctcgtcaggggggcggagcctatggaaaaacgccagcaacgcggcctttttacggttcctggccttttgctggccttttgctcacatgttctttcctgcgttatcccctgattctgtggataaccgtattaccgcctttgagtgagctgataccgctcgccgcagccgaacgaccgagcgcagcgagtcagtgagcgaggaagcggaagagcgcccaatacgcaaaccgcctctccccgcgcgttggccgattcattaatgcagctggcacgacaggtttcccgactggaaagcgggcagtgagcgcaacgcaattaatgtgagttagctcactcattaggcaccccaggctttacactttatgcttccggctcgtatgttgtgtggaattgtgagcggataacaatttcacacaggaaacagcatatgcaaacaagcattactctgacatccaacgcatccggtacgtttgacggttactattacgaactctggaaggatactggcaatacaacaatgacggtctacactcaaggtcgcttttcctgccagtggtcgaacatcaataacgcgttgtttaggaccgggaagaaatacaaccagaattggcagtctcttggcacaatccggatcacgtactctgcgacttacaacccaaacgggaactcctacttgtgtatctatggctggtctaccaacccattggtcgagttctacatcgttgagtcctgggggaactggagaccgcctggtgccacgtccctgggccaagtgacaatcgatggcgggacctacgacatctataggacgacacgcgtcaaccagccttgcttcccaggcgatacacgcattctcgttcagattgacggggttcctcagaagattactctcagggagctctacgagctgttcgaggatgagcgctacgagaacatggtttacgtgcgcaagaagccgaagagggagatcaaggtgtacagcattgacctggagacaggcaaggtggtcctgactgacatcgaggatgtcattaaggccccagcgacggaccacctcatcaggttcgagctggaggatgggcggtctttcgagaccacggtggaccatcctgtcctcgtttacgagaacggccggttcatcgagaagcgcgctttcgaggtcaaggagggggacaaggtgctggtctcagagctggagctggttgagcagtccagctcgtctcaggataatccgaagaacgagaatctcggctccccagagcacgaccagctcctggagatcaagaacatcaagtatgtgcgcgcgaatgacgatttcgtgttctcgctcaatgctaagaagtaccacaacgtcatcatcaatgagaacatcgttacacatcagtccattgtggggacagccacgttcgatcagtactggagcgtgcgcacctctaagcggacttcaggaacagtgaccgtgaccgatcacttccgcgcctgggcgaaccggggcctgaacctcggcacaatagaccaaattacattgtgcgtggagggttaccaaagctctggatcagccaacatcacccagaacaccttctctcagggctcttcttccggcagttcgggtggctcatccggctccacaacgactactcgcatcgagtgtgagaacatgtccttgtccggaccctacgttagcaggatcaccaatccctttaatggtattgcgctgtacgccaacggagacacagcccgcgctaccgttaacttccccgcaagtcgcaactacaatttccgcctgcggggttgcggcaacaacaataatcttgcccgtgtggacctgaggatcgacggacggaccgtcgggaccttttattaccagggcacatacccctgggaggccccaattgacaatgtttatgtcagtgcggggagtcatacagtcgaaatcactgttactgcggataacggcacatgggacgtgtatgccgactacctggtgatacagtgactcgagggggggcccggtacccaattcgccctatagtgagtcgtattacaattcactggccgtcgttttacaacgtcgtgactgggaaaaccctggcgttacccaacttaatcgccttgcagcacatccccctttcgccagctggcgtaatagcgaagaggcccgcaccgatcgcccttcccaacagttgcgcagcctgaatggcgaatggaaattgtaagcgttaatattttgttaaaattcgcgttaaatttttgttaaatcagctcattttttaaccaataggccgaaatcggcaaaatcccttataaatcaaaagaatagaccgagatagggttgagtgttgttccagtttggaacaagagtccactattaaagaacgtggactccaacgtcaaagggcgaaaaaccgtctatcagggcgatggcccactacgtgaaccatcaccctaatcaagttttttggggtcgaggtgccgtaaagcactaaatcggaaccctaaagggagcccccgatttagagcttgacggggaaagccggcgaacgtggcgagaaaggaagggaagaaagcgaaaggagcgggcgctagggcgctggcaagtgtagcggtcacgctgcgcgtaaccaccacacccgccgcgcttaatgcgccgctacagggcgcgtcaggtg

SEQ ID NO: 3086 - DNA, 5327 bp, Artificial Sequence
  Synthetic Construct, AS-86 intein modified protein encoding nucleic acids in pBluescript
gcacttttcggggaaatgtgcgcggaacccctatttgtttatttttctaaatacattcaaatatgtatccgctcatgagacaataaccctgataaatgcttcaataatattgaaaaaggaagagtatgagtattcaacatttccgtgtcgcccttattcccttttttgcggcattttgccttcctgtttttgctcacccagaaacgctggtgaaagtaaaagatgctgaagatcagttgggtgcacgagtgggttacatcgaactggatctcaacagcggtaagatccttgagagttttcgccccgaagaacgttttccaatgatgagcacttttaaagttctgctatgtggcgcggtattatcccgtattgacgccgggcaagagcaactcggtcgccgcatacactattctcagaatgacttggttgagtactcaccagtcacagaaaagcatcttacggatggcatgacagtaagagaattatgcagtgctgccataaccatgagtgataacactgcggccaacttacttctgacaacgatcggaggaccgaaggagctaaccgcttttttgcacaacatgggggatcatgtaactcgccttgatcgttgggaaccggagctgaatgaagccataccaaacgacgagcgtgacaccacgatgcctgtagcaatggcaacaacgttgcgcaaactattaactggcgaactacttactctagcttcccggcaacaattaatagactggatggaggcggataaagttgcaggaccacttctgcgctcggcccttccggctggctggtttattgctgataaatctggagccggtgagcgtgggtctcgcggtatcattgcagcactggggccagatggtaagccctcccgtatcgtagttatctacacgacggggagtcaggcaactatggatgaacgaaatagacagatcgctgagataggtgcctcactgattaagcattggtaactgtcagaccaagtttactcatatatactttagattgatttaaaacttcatttttaatttaaaaggatctaggtgaagatcctttttgataatctcatgaccaaaatcccttaacgtgagttttcgttccactgagcgtcagaccccgtagaaaagatcaaaggatcttcttgagatcctttttttctgcgcgtaatctgctgcttgcaaacaaaaaaaccaccgctaccagcggtggtttgtttgccggatcaagagctaccaactctttttccgaaggtaactggcttcagcagagcgcagataccaaatactgtccttctagtgtagccgtagttaggccaccacttcaagaactctgtagcaccgcctacatacctcgctctgctaatcctgttaccagtggctgctgccagtggcgataagtcgtgtcttaccgggttggactcaagacgatagttaccggataaggcgcagcggtcgggctgaacggggggttcgtgcacacagcccagcttggagcgaacgacctacaccgaactgagatacctacagcgtgagctatgagaaagcgccacgcttcccgaagggagaaaggcggacaggtatccggtaagcggcagggtcggaacaggagagcgcacgagggagcttccagggggaaacgcctggtatctttatagtcctgtcgggtttcgccacctctgacttgagcgtcgatttttgtgatgctcgtcaggggggcggagcctatggaaaaacgccagcaacgcggcctttttacggttcctggccttttgctggccttttgctcacatgttctttcctgcgttatcccctgattctgtggataaccgtattaccgcctttgagtgagctgataccgctcgccgcagccgaacgaccgagcgcagcgagtcagtgagcgaggaagcggaagagcgcccaatacgcaaaccgcctctccccgcgcgttggccgattcattaatgcagctggcacgacaggtttcccgactggaaagcgggcagtgagcgcaacgcaattaatgtgagttagctcactcattaggcaccccaggctttacactttatgcttccggctcgtatgttgtgtggaattgtgagcggataacaatttcacacaggaaacagcatatgcaaacaagcattactctgacatccaacgcatccggtacgtttgacggttactattacgaactctggaaggatactggcaatacaacaatgacggtctacactcaaggtcgcttttcctgccagtggtcgaacatcaataacgcgttgtttaggaccgggaagaaatacaaccagaattggcagtctcttggcacaatccggatcacgtactctgcgacttacaacccaaacgggaactcctacttgtgtatctatggctggtctaccaacccattggtcgagttctacatcgttgagtcctgggggaactggagaccgcctggtgccacgtccctgggccaagtgacaatcgatggcgggacctacgacatctataggacgacacgcgtcaaccagccttgcctgacgggggacgctaaggttatcgctaatggggagctgacaacgatcggggagctggtggagcgcatctcaaatggcaagctgggcccaacccccgtccggggcctcacggttctggggatcgacgaggatggcaagctcgtggagctgccagtcgagtatgtgtacaaggacaagaccagcgagctggtcaagatcaggacgaggctcggcagggagctgaaggttaccccataccaccctctcctggtgaaccgcaggaatgggaagatcgagtgggtgaaggctgaggagctgaagccaggcgacaggctcgctattccgtccttcctccccgccatgctgaacgataatcctctcgctgagtggctgggctacttcttcggcaacgggtacacagacagcgaggagcgcgtggtcttcgagtctaagtcaaaggagctcaggaagcggttcatggagctcactaggaagctgttccaggacgccgagatcaaggaggattccggcaaggtttacgtgtccagctcggaggttaagcgcctcgtgaagtcactgaacaaggattccatcccagagcaggcttggaaggggctcaggagcttcctgagggcgtacttcgactgcaatgctgagatcaaggataagatcattgtgtctacggctggcaaggagatcgccgagcagatttcatacgctctcgctggcctggggatcgtggctgaggtcgacgataaggggtcggtcatcatttctgacccggagaacgtttctaggttcctggatgagatcggcttctcagtcgaggagaagaaggaggaggctaaggccctgattaagaagtcgaccctcaacctgggcatctacgtggacaaggagctcatttcctacgtccgggagaagctcaagctgagcttctacgagaatgagacgatgtggtcgccagagaaggcccgcgagatcgcgtggaagctgatgaaggagatctactaccggctcgacgagctggagcgcttcaagaaggcgctctccaagagcgtgatcattgattggtcggaggtcgagaagaagaaggaggagatcagcgagaagacagggatctcggtgaacgagattctggagtacgccaagggcaagaggaagccgtctctggaggagtatgtgaagatcgcgaaggctctcggcgtggagctgaaggagacactggaggcgattttcactttcgggaagaagtacctgggctacgtgatctccgacgagattgagaccctggaggaggtcaggaaggaggagctcaagcggctgaaggagctcctgaacgacgagaagctgaagaagggggtcgcctacctcatcttcctggcgcagaatgagctcctgtgggatgagatcattgaggtcgagaagctcaagggcgacttcgttatctacgatctgcatgttccaaagtaccacaacttcatcgggggcaatctgccaactgttctgcataattccattgtggggacagccacgttcgatcagtactggagcgtgcgcacctctaagcggacttcaggaacagtgaccgtgaccgatcacttccgcgcctgggcgaaccggggcctgaacctcggcacaatagaccaaattacattgtgcgtggagggttaccaaagctctggatcagccaacatcacccagaacaccttctctcagggctcttcttccggcagttcgggtggctcatccggctccacaacgactactcgcatcgagtgtgagaacatgtccttgtccggaccctacgttagcaggatcaccaatccctttaatggtattgcgctgtacgccaacggagacacagcccgcgctaccgttaacttccccgcaagtcgcaactacaatttccgcctgcggggttgcggcaacaacaataatcttgcccgtgtggacctgaggatcgacggacggaccgtcgggaccttttattaccagggcacatacccctgggaggccccaattgacaatgtttatgtcagtgcggggagtcatacagtcgaaatcactgttactgcggataacggcacatgggacgtgtatgccgactacctggtgatacagtgactcgagggggggcccggtacccaattcgccctatagtgagtcgtattacaattcactggccgtcgttttacaacgtcgtgactgggaaaaccctggcgttacccaacttaatcgccttgcagcacatccccctttcgccagctggcgtaatagcgaagaggcccgcaccgatcgcccttcccaacagttgcgcagcctgaatggcgaatggaaattgtaagcgttaatattttgttaaaattcgcgttaaatttttgttaaatcagctcattttttaaccaataggccgaaatcggcaaaatcccttataaatcaaaagaatagaccgagatagggttgagtgttgttccagtttggaacaagagtccactattaaagaacgtggactccaacgtcaaagggcgaaaaaccgtctatcagggcgatggcccactacgtgaaccatcaccctaatcaagttttttggggtcgaggtgccgtaaagcactaaatcggaaccctaaagggagcccccgatttagagcttgacggggaaagccggcgaacgtggcgagaaaggaagggaagaaagcgaaaggagcgggcgctagggcgctggcaagtgtagcggtcacgctgcgcgtaaccaccacacccgccgcgcttaatgcgccgctacagggcgcgtcaggtg

SEQ ID NO: 3087 - DNA, 5654 bp, Artificial Sequence
  Synthetic Construct, AS-87 intein modified protein encoding nucleic acids in pBluescript
gcacttttcggggaaatgtgcgcggaacccctatttgtttatttttctaaatacattcaaatatgtatccgctcatgagacaataaccctgataaatgcttcaataatattgaaaaaggaagagtatgagtattcaacatttccgtgtcgcccttattcccttttttgcggcattttgccttcctgtttttgctcacccagaaacgctggtgaaagtaaaagatgctgaagatcagttgggtgcacgagtgggttacatcgaactggatctcaacagcggtaagatccttgagagttttcgccccgaagaacgttttccaatgatgagcacttttaaagttctgctatgtggcgcggtattatcccgtattgacgccgggcaagagcaactcggtcgccgcatacactattctcagaatgacttggttgagtactcaccagtcacagaaaagcatcttacggatggcatgacagtaagagaattatgcagtgctgccataaccatgagtgataacactgcggccaacttacttctgacaacgatcggaggaccgaaggagctaaccgcttttttgcacaacatgggggatcatgtaactcgccttgatcgttgggaaccggagctgaatgaagccataccaaacgacgagcgtgacaccacgatgcctgtagcaatggcaacaacgttgcgcaaactattaactggcgaactacttactctagcttcccggcaacaattaatagactggatggaggcggataaagttgcaggaccacttctgcgctcggcccttccggctggctggtttattgctgataaatctggagccggtgagcgtgggtctcgcggtatcattgcagcactggggccagatggtaagccctcccgtatcgtagttatctacacgacggggagtcaggcaactatggatgaacgaaatagacagatcgctgagataggtgcctcactgattaagcattggtaactgtcagaccaagtttactcatatatactttagattgatttaaaacttcatttttaatttaaaaggatctaggtgaagatcctttttgataatctcatgaccaaaatcccttaacgtgagttttcgttccactgagcgtcagaccccgtagaaaagatcaaaggatcttcttgagatcctttttttctgcgcgtaatctgctgcttgcaaacaaaaaaaccaccgctaccagcggtggtttgtttgccggatcaagagctaccaactctttttccgaaggtaactggcttcagcagagcgcagataccaaatactgtccttctagtgtagccgtagttaggccaccacttcaagaactctgtagcaccgcctacatacctcgctctgctaatcctgttaccagtggctgctgccagtggcgataagtcgtgtcttaccgggttggactcaagacgatagttaccggataaggcgcagcggtcgggctgaacggggggttcgtgcacacagcccagcttggagcgaacgacctacaccgaactgagatacctacagcgtgagctatgagaaagcgccacgcttcccgaagggagaaaggcggacaggtatccggtaagcggcagggtcggaacaggagagcgcacgagggagcttccagggggaaacgcctggtatctttatagtcctgtcgggtttcgccacctctgacttgagcgtcgatttttgtgatgctcgtcaggggggcggagcctatggaaaaacgccagcaacgcggcctttttacggttcctggccttttgctggccttttgctcacatgttctttcctgcgttatcccctgattctgtggataaccgtattaccgcctttgagtgagctgataccgctcgccgcagccgaacgaccgagcgcagcgagtcagtgagcgaggaagcggaagagcgcccaatacgcaaaccgcctctccccgcgcgttggccgattcattaatgcagctggcacgacaggtttcccgactggaaagcgggcagtgagcgcaacgcaattaatgtgagttagctcactcattaggcaccccaggctttacactttatgcttccggctcgtatgttgtgtggaattgtgagcggataacaatttcacacaggaaacagcatatgcaaacaagcattactctgacatccaacgcatccggtacgtttgacggttactattacgaactctggaaggatactggcaatacaacaatgacggtctacactcaaggtcgcttttcctgccagtggtcgaacatcaataacgcgttgtttaggaccgggaagaaatacaaccagaattggcagtctcttggcacaatccggatcacgtactctgcgacttacaacccaaacgggaactcctacttgtgtatctatggctggtctaccaacccattggtcgagttctacatcgttgagtcctgggggaactggagaccgcctggtgccacgtccctgggccaagtgacaatcgatggcgggacctacgacatctataggacgacacgcgtcaaccagccttgcgttacaggggacacaaaggtctacacgcctgatgagcgggaggttaagattagggatttcatgaattacttcgagaatgggctgatcaaggaggtgtctaatcgcatcgggagggacacagtcattgccgcggtttccttcaacagccgcatcgtgggccacccagtctacaggctcactctggagtccgggaggatcattgaggccactggcgaccacatgttcctcacccctgaggggtggaagcagacgtacgatatcaaggagggcagcgaggtcctcgttaagccaaccctggagggcacgccttacgagccagaccccagggtcatcattgatatcaaggagttctacaacttcctggagaagatcgagcgcgagcacaacctcaagccactgaaggaggcgaagacgttcagggagctcatcacaaaggacaaggagaagattctgaggagggctctggagctgagggctgagatcgagaacggcctgaccaagcgggaggcggagatcctggagctgatttctgctgatacgtggatccctcgcgctgagctggagaagaaggccaggatctcaaggacccggctgaatcagattctccagcggctggagaagaaggggtacatcgagcggcgcattgagggccgcaagcagttcgtgcggaagatccgcaatggcaagattctccggaacgccatggacatcaagcgcattctggaggaggagttcggcatcaagatttcatacaccacggtcaagaagctcctgtccgggaacgttgatggcatggcgtaccgcatcctcaaggaggtcaaggagaagtggctggttcgctacgacgatgagaaggcggggatcctggctagggtggtcggcttcattctcggcgacgggcacctggctaggaatggccggatctggttcaactccagcaaggaggagctggagatgctggctaacgacctccggaagctcggcctgaagccgtcggagatcattgagcgcgattcgtcttcagagatccaggggcggaaggtgaagggccgcatctacatgctctacgtggacaatgctgccttccatgccctcctgaggttctggaaggtggaggtcgggaacaagaccaagaagggctacacggttccggagtggatcaagaagggcaatctcttcgtcaagagggagttcctcaggggcctgttcggggctgacggcaccaagccctgcgggaagcgctacaacttcaatggcatcaagctggagattcgggctaagaaggagtccctggagcgcacggtggagttcctgaacgacgtcgccgatctcctgagggagttcgacgttgattcgaagatcacagtgtctccgactaaggagggcttcatcattaggctcatcgtgacacccaacgacgccaattacctcaacttcctgacacgggtggggtacgcctacgcgaaggatacttacgccaggctcgtcggcgagtacatccggattaagctcgcgtacaagaacatcattctgcccggcatcgctgagaaggccattgagctggcgacagtcactaacagcacgtacgcggctaaggttctcggcgtgtcgagggacttcgttgtgaatcggctgaaggggacacagatcggcattactagggatttcatgaccttcgaggagttcatgaaggagcgggtgctgaacggctacgtgatcgagaaggtcatcaagaaggagaagctcggctacctggacgtctacgacgttacttgcgctcgggatcatagcttcatttccaatgggctcgtttctcataattccattgtggggacagccacgttcgatcagtactggagcgtgcgcacctctaagcggacttcaggaacagtgaccgtgaccgatcacttccgcgcctgggcgaaccggggcctgaacctcggcacaatagaccaaattacattgtgcgtggagggttaccaaagctctggatcagccaacatcacccagaacaccttctctcagggctcttcttccggcagttcgggtggctcatccggctccacaacgactactcgcatcgagtgtgagaacatgtccttgtccggaccctacgttagcaggatcaccaatccctttaatggtattgcgctgtacgccaacggagacacagcccgcgctaccgttaacttccccgcaagtcgcaactacaatttccgcctgcggggttgcggcaacaacaataatcttgcccgtgtggacctgaggatcgacggacggaccgtcgggaccttttattaccagggcacatacccctgggaggccccaattgacaatgtttatgtcagtgcggggagtcatacagtcgaaatcactgttactgcggataacggcacatgggacgtgtatgccgactacctggtgatacagtgactcgagggggggcccggtacccaattcgccctatagtgagtcgtattacaattcactggccgtcgttttacaacgtcgtgactgggaaaaccctggcgttacccaacttaatcgccttgcagcacatccccctttcgccagctggcgtaatagcgaagaggcccgcaccgatcgcccttcccaacagttgcgcagcctgaatggcgaatggaaattgtaagcgttaatattttgttaaaattcgcgttaaatttttgttaaatcagctcattttttaaccaataggccgaaatcggcaaaatcccttataaatcaaaagaatagaccgagatagggttgagtgttgttccagtttggaacaagagtccactattaaagaacgtggactccaacgtcaaagggcgaaaaaccgtctatcagggcgatggcccactacgtgaaccatcaccctaatcaagttttttggggtcgaggtgccgtaaagcactaaatcggaaccctaaagggagcccccgatttagagcttgacggggaaagccggcgaacgtggcgagaaaggaagggaagaaagcgaaaggagcgggcgctagggcgctggcaagtgtagcggtcacgctgcgcgtaaccaccacacccgccgcgcttaatgcgccgctacagggcgcgtcaggtg

SEQ ID NO: 3088 - DNA, 5027 bp, Artificial Sequence
  Synthetic Construct, AS-88 intein modified protein encoding nucleic acids in pBluescript
gcacttttcggggaaatgtgcgcggaacccctatttgtttatttttctaaatacattcaaatatgtatccgctcatgagacaataaccctgataaatgcttcaataatattgaaaaaggaagagtatgagtattcaacatttccgtgtcgcccttattcccttttttgcggcattttgccttcctgtttttgctcacccagaaacgctggtgaaagtaaaagatgctgaagatcagttgggtgcacgagtgggttacatcgaactggatctcaacagcggtaagatccttgagagttttcgccccgaagaacgttttccaatgatgagcacttttaaagttctgctatgtggcgcggtattatcccgtattgacgccgggcaagagcaactcggtcgccgcatacactattctcagaatgacttggttgagtactcaccagtcacagaaaagcatcttacggatggcatgacagtaagagaattatgcagtgctgccataaccatgagtgataacactgcggccaacttacttctgacaacgatcggaggaccgaaggagctaaccgcttttttgcacaacatgggggatcatgtaactcgccttgatcgttgggaaccggagctgaatgaagccataccaaacgacgagcgtgacaccacgatgcctgtagcaatggcaacaacgttgcgcaaactattaactggcgaactacttactctagcttcccggcaacaattaatagactggatggaggcggataaagttgcaggaccacttctgcgctcggcccttccggctggctggtttattgctgataaatctggagccggtgagcgtgggtctcgcggtatcattgcagcactggggccagatggtaagccctcccgtatcgtagttatctacacgacggggagtcaggcaactatggatgaacgaaatagacagatcgctgagataggtgcctcactgattaagcattggtaactgtcagaccaagtttactcatatatactttagattgatttaaaacttcatttttaatttaaaaggatctaggtgaagatcctttttgataatctcatgaccaaaatcccttaacgtgagttttcgttccactgagcgtcagaccccgtagaaaagatcaaaggatcttcttgagatcctttttttctgcgcgtaatctgctgcttgcaaacaaaaaaaccaccgctaccagcggtggtttgtttgccggatcaagagctaccaactctttttccgaaggtaactggcttcagcagagcgcagataccaaatactgtccttctagtgtagccgtagttaggccaccacttcaagaactctgtagcaccgcctacatacctcgctctgctaatcctgttaccagtggctgctgccagtggcgataagtcgtgtcttaccgggttggactcaagacgatagttaccggataaggcgcagcggtcgggctgaacggggggttcgtgcacacagcccagcttggagcgaacgacctacaccgaactgagatacctacagcgtgagctatgagaaagcgccacgcttcccgaagggagaaaggcggacaggtatccggtaagcggcagggtcggaacaggagagcgcacgagggagcttccagggggaaacgcctggtatctttatagtcctgtcgggtttcgccacctctgacttgagcgtcgatttttgtgatgctcgtcaggggggcggagcctatggaaaaacgccagcaacgcggcctttttacggttcctggccttttgctggccttttgctcacatgttctttcctgcgttatcccctgattctgtggataaccgtattaccgcctttgagtgagctgataccgctcgccgcagccgaacgaccgagcgcagcgagtcagtgagcgaggaagcggaagagcgcccaatacgcaaaccgcctctccccgcgcgttggccgattcattaatgcagctggcacgacaggtttcccgactggaaagcgggcagtgagcgcaacgcaattaatgtgagttagctcactcattaggcaccccaggctttacactttatgcttccggctcgtatgttgtgtggaattgtgagcggataacaatttcacacaggaaacagcatatgcaaacaagcattactctgacatccaacgcatccggtacgtttgacggttactattacgaactctggaaggatactggcaatacaacaatgacggtctacactcaaggtcgcttttcctgccagtggtcgaacatcaataacgcgttgtttaggaccgggaagaaatacaaccagaattggcagtctcttggcacaatccggatcacgtactctgcgacttacaacccaaacgggaactcctacttgtgtatctatggctggtctaccaacccattggtcgagttctacatcgttgagtcctgggggaactggagaccgcctggtgccacgtccctgggccaagtgacaatcgatggcgggacctacgacatctataggacgacacgcgtcaaccagccttgcatcgatggcaacgctaagattattttcgagaatgagggggaggagcatctgacaactatggctgagatgtacgagcgctaccgccacctcggcgagttctacgacgagaactacaatcgctgggggattgatgtgtccagcgtcccgatctacgtgaagtccttcgacccagagacgaggagggtggtcaagggcagggtccgggccatctggaagtacgagctgggcgaggagattccgaagtacgagatccgcacacacaagggcactaagattctcaccagcccatggcatcctttcttcgtcctgacaccagacttcgaggttatcgagaagagggcggacgagctcaaagtgggcgatatcctgattggcgggatgcctgacggggaggatcacgagctcattttcgactactggctggctggcttcatcgctggcaacgggaatctcgacgattcggagagggagtacaaggcccgcgagctcctggatggcatcgagaacgggattccgcccaagatcctgaggaagggcaagaatgccgtcctctctttcatcacgggcctgttcgacgctgaggggcacgttaacgataagtcaggcattgagctcgggatggtgaataagaagctgatcgaggctgtcacacattacctcaacagcctgggcatcaaggcccgcatgagggagaagcggcgcaagaatggcatcgactacattatgcacgtggaggagtactcgtctctcctgcggttctacgagctcattggcaagcatctgcagaacaatgagaagaaggagaagctggagatcctcctgcacaagcataacggcggggcgttcgatctctcactgaacttcaatgctttcaaggagtgggcctccaggtacggcgtcgagttcaagaccaacgggaatcagatcctcgctatcattggcaacgagaaggttagcctgggccagtggcacgcgagggggcatgtgtcgaaggctgtcctggttaagatgctccggaagctgtacgaggttactaagaacgacgaggtgaaggagatgctccacctgatcgagtccctggaggttgtgaaggagatcaccattacgaacgagcccaagaccttctacgatctgacagtggataagtaccagaactacctcgccggggagaatggcatgattttcgtgcataattccattgtggggacagccacgttcgatcagtactggagcgtgcgcacctctaagcggacttcaggaacagtgaccgtgaccgatcacttccgcgcctgggcgaaccggggcctgaacctcggcacaatagaccaaattacattgtgcgtggagggttaccaaagctctggatcagccaacatcacccagaacaccttctctcagggctcttcttccggcagttcgggtggctcatccggctccacaacgactactcgcatcgagtgtgagaacatgtccttgtccggaccctacgttagcaggatcaccaatccctttaatggtattgcgctgtacgccaacggagacacagcccgcgctaccgttaacttccccgcaagtcgcaactacaatttccgcctgcggggttgcggcaacaacaataatcttgcccgtgtggacctgaggatcgacggacggaccgtcgggaccttttattaccagggcacatacccctgggaggccccaattgacaatgtttatgtcagtgcggggagtcatacagtcgaaatcactgttactgcggataacggcacatgggacgtgtatgccgactacctggtgatacagtgactcgagggggggcccggtacccaattcgccctatagtgagtcgtattacaattcactggccgtcgttttacaacgtcgtgactgggaaaaccctggcgttacccaacttaatcgccttgcagcacatccccctttcgccagctggcgtaatagcgaagaggcccgcaccgatcgcccttcccaacagttgcgcagcctgaatggcgaatggaaattgtaagcgttaatattttgttaaaattcgcgttaaatttttgttaaatcagctcattttttaaccaataggccgaaatcggcaaaatcccttataaatcaaaagaatagaccgagatagggttgagtgttgttccagtttggaacaagagtccactattaaagaacgtggactccaacgtcaaagggcgaaaaaccgtctatcagggcgatggcccactacgtgaaccatcaccctaatcaagttttttggggtcgaggtgccgtaaagcactaaatcggaaccctaaagggagcccccgatttagagcttgacggggaaagccggcgaacgtggcgagaaaggaagggaagaaagcgaaaggagcgggcgctagggcgctggcaagtgtagcggtcacgctgcgcgtaaccaccacacccgccgcgcttaatgcgccgctacagggcgcgtcaggtg

SEQ ID NO: 3089 - DNA, 5144 bp, Artificial Sequence
  Synthetic Construct, AS-89 intein modified protein encoding nucleic acids in pBluescript
gcacttttcggggaaatgtgcgcggaacccctatttgtttatttttctaaatacattcaaatatgtatccgctcatgagacaataaccctgataaatgcttcaataatattgaaaaaggaagagtatgagtattcaacatttccgtgtcgcccttattcccttttttgcggcattttgccttcctgtttttgctcacccagaaacgctggtgaaagtaaaagatgctgaagatcagttgggtgcacgagtgggttacatcgaactggatctcaacagcggtaagatccttgagagttttcgccccgaagaacgttttccaatgatgagcacttttaaagttctgctatgtggcgcggtattatcccgtattgacgccgggcaagagcaactcggtcgccgcatacactattctcagaatgacttggttgagtactcaccagtcacagaaaagcatcttacggatggcatgacagtaagagaattatgcagtgctgccataaccatgagtgataacactgcggccaacttacttctgacaacgatcggaggaccgaaggagctaaccgcttttttgcacaacatgggggatcatgtaactcgccttgatcgttgggaaccggagctgaatgaagccataccaaacgacgagcgtgacaccacgatgcctgtagcaatggcaacaacgttgcgcaaactattaactggcgaactacttactctagcttcccggcaacaattaatagactggatggaggcggataaagttgcaggaccacttctgcgctcggcccttccggctggctggtttattgctgataaatctggagccggtgagcgtgggtctcgcggtatcattgcagcactggggccagatggtaagccctcccgtatcgtagttatctacacgacggggagtcaggcaactatggatgaacgaaatagacagatcgctgagataggtgcctcactgattaagcattggtaactgtcagaccaagtttactcatatatactttagattgatttaaaacttcatttttaatttaaaaggatctaggtgaagatcctttttgataatctcatgaccaaaatcccttaacgtgagttttcgttccactgagcgtcagaccccgtagaaaagatcaaaggatcttcttgagatcctttttttctgcgcgtaatctgctgcttgcaaacaaaaaaaccaccgctaccagcggtggtttgtttgccggatcaagagctaccaactctttttccgaaggtaactggcttcagcagagcgcagataccaaatactgtccttctagtgtagccgtagttaggccaccacttcaagaactctgtagcaccgcctacatacctcgctctgctaatcctgttaccagtggctgctgccagtggcgataagtcgtgtcttaccgggttggactcaagacgatagttaccggataaggcgcagcggtcgggctgaacggggggttcgtgcacacagcccagcttggagcgaacgacctacaccgaactgagatacctacagcgtgagctatgagaaagcgccacgcttcccgaagggagaaaggcggacaggtatccggtaagcggcagggtcggaacaggagagcgcacgagggagcttccagggggaaacgcctggtatctttatagtcctgtcgggtttcgccacctctgacttgagcgtcgatttttgtgatgctcgtcaggggggcggagcctatggaaaaacgccagcaacgcggcctttttacggttcctggccttttgctggccttttgctcacatgttctttcctgcgttatcccctgattctgtggataaccgtattaccgcctttgagtgagctgataccgctcgccgcagccgaacgaccgagcgcagcgagtcagtgagcgaggaagcggaagagcgcccaatacgcaaaccgcctctccccgcgcgttggccgattcattaatgcagctggcacgacaggtttcccgactggaaagcgggcagtgagcgcaacgcaattaatgtgagttagctcactcattaggcaccccaggctttacactttatgcttccggctcgtatgttgtgtggaattgtgagcggataacaatttcacacaggaaacagcatatgcaaacaagcattactctgacatccaacgcatccggtacgtttgacggttactattacgaactctggaaggatactggcaatacaacaatgacggtctacactcaaggtcgcttttcctgccagtggtcgaacatcaataacgcgttgtttaggaccgggaagaaatacaaccagaattggcagtctcttggcacaatccggatcacgtactctgcgacttacaacccaaacgggaactcctacttgtgtatctatggctggtctaccaacccattggtcgagttctacatcgttgagtcctgggggaactggagaccgcctggtgccacgtccctgggccaagtgacaatcgatggcgggacctacgacatctataggacgacacgcgtcaaccagccttgcttcacaggggacactcgcatcctgacggagaaggggctgattcctattgaggagatcgtgcatgagacgggcaagaagccaaaggtggtcacacacgctggcctcaaggacatcattgagacttacgataacggggagatggaggttttccgcgtgaccacggaggacggctacgagctcaaggtgaccggggaccataagttcctggtcttcgatgagaacggcaatccaacgctcaagcctctgaaggagctcaaagtgggggactacgtctacatcctggctccagagtggaagggcggggagtatgtggagctcgatacaaacatcgagctgaagggcaaggggtacaacgttaatctgccctcgaagctcgacgagaagctggcgtacctcctgggcatcatctacgctgatgggcacatccgccattacttcgagaacggcaagcgcaagaactccaagatcgagatctacctccaccaggacgagaccgagatcaaggagaaggtgaagaggtacttcaaggagatcttcggcattgagccaaaggagttcctcaaggaggagcagcataaggtcatcctggttattccttccacgaagattgtcaagttcctggagatcaacggcctcctgaaggacaagagcgagaatattcgggttccggaggctatcttccgctcccgcccatctgtgatcgctgcgttcctggctggcttcttcgacggcgatgggtcgatcgatcagaactaccggatcgccttcaagtccattagccgcgagttcatcaaggaggctcagctcctgttcctcgccctgggcatcgtgacatccattcaggagtacaacccgcccaatccaaacaataagacagtttacactctccgggtgcagactcgcgacatgaagatcaaggcgttcaacgtcctcaaggagagcgttaagctgtcgaagattatgaaggaggctatctctaagctggaggagaacggcaagaataagaagttctcattcccgttcaacgccatctaccacattaaggaccccaagatcagggcgaagattcagcgggattacaagatcctctcatacaattccaaggtgacccatagggccttcatcaacaatattctcaagctgaaggaggagctcggcctggacgatgaggaggtcaagtacttcgagatgctgagcaagctctacccaaccaagatcacgaagattgagcctctggggaaggcgcacgtctacgatctccaggttgaggatgttcatctgctcacaggcaatggcatctacacaagcaattccattgtggggacagccacgttcgatcagtactggagcgtgcgcacctctaagcggacttcaggaacagtgaccgtgaccgatcacttccgcgcctgggcgaaccggggcctgaacctcggcacaatagaccaaattacattgtgcgtggagggttaccaaagctctggatcagccaacatcacccagaacaccttctctcagggctcttcttccggcagttcgggtggctcatccggctccacaacgactactcgcatcgagtgtgagaacatgtccttgtccggaccctacgttagcaggatcaccaatccctttaatggtattgcgctgtacgccaacggagacacagcccgcgctaccgttaacttccccgcaagtcgcaactacaatttccgcctgcggggttgcggcaacaacaataatcttgcccgtgtggacctgaggatcgacggacggaccgtcgggaccttttattaccagggcacatacccctgggaggccccaattgacaatgtttatgtcagtgcggggagtcatacagtcgaaatcactgttactgcggataacggcacatgggacgtgtatgccgactacctggtgatacagtgactcgagggggggcccggtacccaattcgccctatagtgagtcgtattacaattcactggccgtcgttttacaacgtcgtgactgggaaaaccctggcgttacccaacttaatcgccttgcagcacatccccctttcgccagctggcgtaatagcgaagaggcccgcaccgatcgcccttcccaacagttgcgcagcctgaatggcgaatggaaattgtaagcgttaatattttgttaaaattcgcgttaaatttttgttaaatcagctcattttttaaccaataggccgaaatcggcaaaatcccttataaatcaaaagaatagaccgagatagggttgagtgttgttccagtttggaacaagagtccactattaaagaacgtggactccaacgtcaaagggcgaaaaaccgtctatcagggcgatggcccactacgtgaaccatcaccctaatcaagttttttggggtcgaggtgccgtaaagcactaaatcggaaccctaaagggagcccccgatttagagcttgacggggaaagccggcgaacgtggcgagaaaggaagggaagaaagcgaaaggagcgggcgctagggcgctggcaagtgtagcggtcacgctgcgcgtaaccaccacacccgccgcgcttaatgcgccgctacagggcgcgtcaggtg

SEQ ID NO: 3090 - DNA, 4976 bp, Artificial Sequence
  Synthetic Construct, AS-90 intein modified protein encoding nucleic acids in pBluescript
gcacttttcggggaaatgtgcgcggaacccctatttgtttatttttctaaatacattcaaatatgtatccgctcatgagacaataaccctgataaatgcttcaataatattgaaaaaggaagagtatgagtattcaacatttccgtgtcgcccttattcccttttttgcggcattttgccttcctgtttttgctcacccagaaacgctggtgaaagtaaaagatgctgaagatcagttgggtgcacgagtgggttacatcgaactggatctcaacagcggtaagatccttgagagttttcgccccgaagaacgttttccaatgatgagcacttttaaagttctgctatgtggcgcggtattatcccgtattgacgccgggcaagagcaactcggtcgccgcatacactattctcagaatgacttggttgagtactcaccagtcacagaaaagcatcttacggatggcatgacagtaagagaattatgcagtgctgccataaccatgagtgataacactgcggccaacttacttctgacaacgatcggaggaccgaaggagctaaccgcttttttgcacaacatgggggatcatgtaactcgccttgatcgttgggaaccggagctgaatgaagccataccaaacgacgagcgtgacaccacgatgcctgtagcaatggcaacaacgttgcgcaaactattaactggcgaactacttactctagcttcccggcaacaattaatagactggatggaggcggataaagttgcaggaccacttctgcgctcggcccttccggctggctggtttattgctgataaatctggagccggtgagcgtgggtctcgcggtatcattgcagcactggggccagatggtaagccctcccgtatcgtagttatctacacgacggggagtcaggcaactatggatgaacgaaatagacagatcgctgagataggtgcctcactgattaagcattggtaactgtcagaccaagtttactcatatatactttagattgatttaaaacttcatttttaatttaaaaggatctaggtgaagatcctttttgataatctcatgaccaaaatcccttaacgtgagttttcgttccactgagcgtcagaccccgtagaaaagatcaaaggatcttcttgagatcctttttttctgcgcgtaatctgctgcttgcaaacaaaaaaaccaccgctaccagcggtggtttgtttgccggatcaagagctaccaactctttttccgaaggtaactggcttcagcagagcgcagataccaaatactgtccttctagtgtagccgtagttaggccaccacttcaagaactctgtagcaccgcctacatacctcgctctgctaatcctgttaccagtggctgctgccagtggcgataagtcgtgtcttaccgggttggactcaagacgatagttaccggataaggcgcagcggtcgggctgaacggggggttcgtgcacacagcccagcttggagcgaacgacctacaccgaactgagatacctacagcgtgagctatgagaaagcgccacgcttcccgaagggagaaaggcggacaggtatccggtaagcggcagggtcggaacaggagagcgcacgagggagcttccagggggaaacgcctggtatctttatagtcctgtcgggtttcgccacctctgacttgagcgtcgatttttgtgatgctcgtcaggggggcggagcctatggaaaaacgccagcaacgcggcctttttacggttcctggccttttgctggccttttgctcacatgttctttcctgcgttatcccctgattctgtggataaccgtattaccgcctttgagtgagctgataccgctcgccgcagccgaacgaccgagcgcagcgagtcagtgagcgaggaagcggaagagcgcccaatacgcaaaccgcctctccccgcgcgttggccgattcattaatgcagctggcacgacaggtttcccgactggaaagcgggcagtgagcgcaacgcaattaatgtgagttagctcactcattaggcaccccaggctttacactttatgcttccggctcgtatgttgtgtggaattgtgagcggataacaatttcacacaggaaacagcatatgcaaacaagcattactctgacatccaacgcatccggtacgtttgacggttactattacgaactctggaaggatactggcaatacaacaatgacggtctacactcaaggtcgcttttcctgccagtggtcgaacatcaataacgcgttgtttaggaccgggaagaaatacaaccagaattggcagtctcttggcacaatccggatcacgtactctgcgacttacaacccaaacgggaactcctacttgtgtatctatggctggtctaccaacccattggtcgagttctacatcgttgagtcctgggggaactggagaccgcctggtgccacgtccctgggccaagtgacaatcgatggcgggacctacgacatctataggacgacacgcgtcaaccagccttgcgtggtcggggagacaaggattctgacgcctgagggctacatcaaggctgaggagctgttcaagctcgccaaggagcggggcaagatggaggccatcgctgtggagggcattgctgagggcggggagccatacgcgtactctctggagatcctcctgcctggcgacaagcaggtcaagtacgagaccgttcacgggaacgctgtggaggtcgccgatccggtttcagtgcccgcctacgtgtggaaggtcggcatgaaggaggttgcccgcgtgaggacaaaggagggctacgagatcaccgccacgctcgaccataagctgatgactccggagggctggaaggagatcaaggacctgaagccaggggataagattctcctgcctaggttcgaggtggaggaggacttcggctccgagagcatcggggaggatctcgcgttcgtcctgggctggttcattggcgacgggtacctcaacgttaaggataagcgggcgtggttctacttcaatgctgagaaggaggaggagatcgcctggaagatccgcgagattctggctaagaggttcgagatcaaggccgagccacaccgctacggcaaccagattaagctcggcgtcagggggaaggcgtacgagtggctggagtccatcgttaagaccaacgagaagaggatcccggagattgtgtaccggctcaagcccaatgagattgcctcattcctcaggggcctgttctccgctgacggctacgtggacaatgatatggctatccgcctcacgtcgaagtctcgggagctcctgcgcgaggtccaggatctcctgctcctgttcggcatcctgtccaagatctacgagaggccgtacaagcgggagttcaagtacaccacgaaggacggcgaggagcgcacatacacaactgaggggtactacgagctcgtgatcgcgaactactcccggaagatcttcgctgagcgcattggcctggaggggtacaagatggagaagctcagcctggagaagatcaaggtcgacgagcccattgtcaccgttgagtcggtggagatcctcggcaagaagctggtctacgacttcactgttccagagcatcacatgtacatttccaatgggttcatgagccacaactccattgtggggacagccacgttcgatcagtactggagcgtgcgcacctctaagcggacttcaggaacagtgaccgtgaccgatcacttccgcgcctgggcgaaccggggcctgaacctcggcacaatagaccaaattacattgtgcgtggagggttaccaaagctctggatcagccaacatcacccagaacaccttctctcagggctcttcttccggcagttcgggtggctcatccggctccacaacgactactcgcatcgagtgtgagaacatgtccttgtccggaccctacgttagcaggatcaccaatccctttaatggtattgcgctgtacgccaacggagacacagcccgcgctaccgttaacttccccgcaagtcgcaactacaatttccgcctgcggggttgcggcaacaacaataatcttgcccgtgtggacctgaggatcgacggacggaccgtcgggaccttttattaccagggcacatacccctgggaggccccaattgacaatgtttatgtcagtgcggggagtcatacagtcgaaatcactgttactgcggataacggcacatgggacgtgtatgccgactacctggtgatacagtgactcgagggggggcccggtacccaattcgccctatagtgagtcgtattacaattcactggccgtcgttttacaacgtcgtgactgggaaaaccctggcgttacccaacttaatcgccttgcagcacatccccctttcgccagctggcgtaatagcgaagaggcccgcaccgatcgcccttcccaacagttgcgcagcctgaatggcgaatggaaattgtaagcgttaatattttgttaaaattcgcgttaaatttttgttaaatcagctcattttttaaccaataggccgaaatcggcaaaatcccttataaatcaaaagaatagaccgagatagggttgagtgttgttccagtttggaacaagagtccactattaaagaacgtggactccaacgtcaaagggcgaaaaaccgtctatcagggcgatggcccactacgtgaaccatcaccctaatcaagttttttggggtcgaggtgccgtaaagcactaaatcggaaccctaaagggagcccccgatttagagcttgacggggaaagccggcgaacgtggcgagaaaggaagggaagaaagcgaaaggagcgggcgctagggcgctggcaagtgtagcggtcacgctgcgcgtaaccaccacacccgccgcgcttaatgcgccgctacagggcgcgtcaggtg

SEQ ID NO: 3091 - DNA, 5138 bp, Artificial Sequence
  Synthetic Construct, AS-91 intein modified protein encoding nucleic acids in pBluescript
gcacttttcggggaaatgtgcgcggaacccctatttgtttatttttctaaatacattcaaatatgtatccgctcatgagacaataaccctgataaatgcttcaataatattgaaaaaggaagagtatgagtattcaacatttccgtgtcgcccttattcccttttttgcggcattttgccttcctgtttttgctcacccagaaacgctggtgaaagtaaaagatgctgaagatcagttgggtgcacgagtgggttacatcgaactggatctcaacagcggtaagatccttgagagttttcgccccgaagaacgttttccaatgatgagcacttttaaagttctgctatgtggcgcggtattatcccgtattgacgccgggcaagagcaactcggtcgccgcatacactattctcagaatgacttggttgagtactcaccagtcacagaaaagcatcttacggatggcatgacagtaagagaattatgcagtgctgccataaccatgagtgataacactgcggccaacttacttctgacaacgatcggaggaccgaaggagctaaccgcttttttgcacaacatgggggatcatgtaactcgccttgatcgttgggaaccggagctgaatgaagccataccaaacgacgagcgtgacaccacgatgcctgtagcaatggcaacaacgttgcgcaaactattaactggcgaactacttactctagcttcccggcaacaattaatagactggatggaggcggataaagttgcaggaccacttctgcgctcggcccttccggctggctggtttattgctgataaatctggagccggtgagcgtgggtctcgcggtatcattgcagcactggggccagatggtaagccctcccgtatcgtagttatctacacgacggggagtcaggcaactatggatgaacgaaatagacagatcgctgagataggtgcctcactgattaagcattggtaactgtcagaccaagtttactcatatatactttagattgatttaaaacttcatttttaatttaaaaggatctaggtgaagatcctttttgataatctcatgaccaaaatcccttaacgtgagttttcgttccactgagcgtcagaccccgtagaaaagatcaaaggatcttcttgagatcctttttttctgcgcgtaatctgctgcttgcaaacaaaaaaaccaccgctaccagcggtggtttgtttgccggatcaagagctaccaactctttttccgaaggtaactggcttcagcagagcgcagataccaaatactgtccttctagtgtagccgtagttaggccaccacttcaagaactctgtagcaccgcctacatacctcgctctgctaatcctgttaccagtggctgctgccagtggcgataagtcgtgtcttaccgggttggactcaagacgatagttaccggataaggcgcagcggtcgggctgaacggggggttcgtgcacacagcccagcttggagcgaacgacctacaccgaactgagatacctacagcgtgagctatgagaaagcgccacgcttcccgaagggagaaaggcggacaggtatccggtaagcggcagggtcggaacaggagagcgcacgagggagcttccagggggaaacgcctggtatctttatagtcctgtcgggtttcgccacctctgacttgagcgtcgatttttgtgatgctcgtcaggggggcggagcctatggaaaaacgccagcaacgcggcctttttacggttcctggccttttgctggccttttgctcacatgttctttcctgcgttatcccctgattctgtggataaccgtattaccgcctttgagtgagctgataccgctcgccgcagccgaacgaccgagcgcagcgagtcagtgagcgaggaagcggaagagcgcccaatacgcaaaccgcctctccccgcgcgttggccgattcattaatgcagctggcacgacaggtttcccgactggaaagcgggcagtgagcgcaacgcaattaatgtgagttagctcactcattaggcaccccaggctttacactttatgcttccggctcgtatgttgtgtggaattgtgagcggataacaatttcacacaggaaacagcatatgcaaacaagcattactctgacatccaacgcatccggtacgtttgacggttactattacgaactctggaaggatactggcaatacaacaatgacggtctacactcaaggtcgcttttcctgccagtggtcgaacatcaataacgcgttgtttaggaccgggaagaaatacaaccagaattggcagtctcttggcacaatccggatcacgtactctgcgacttacaacccaaacgggaactcctacttgtgtatctatggctggtctaccaacccattggtcgagttctacatcgttgagtcctgggggaactggagaccgcctggtgccacgtccctgggccaagtgacaatcgatggcgggacctacgacatctataggacgacacgcgtcaaccagccttgcctcgcgcctgggtcaaaggtcctcacggagcatggctactggctgaaggtggaggagctgccggagaagttcaagctgcagggcgttaaggtgtacaacctggacgagggccacaacgatacaagcaatgttgctttcgtggctgagagggaggtggagactggcgagatggccgtccgcgttaccacggagtccggcaggatcattgaggggagcgaggaccatccagtcctgacccctgagggctacgtttacctcgggaacctgaaggagggcaatctcgtgattgtctacccgttcgagggggttgagtacgaggagaggaagggcgtgatcctcgacgaggatgcgttcaaggacgaggatccccaggtgctctccttcctgagggagaagggcctcgtcccactgcgctgggacgatccccgcatcgggacaattgctcggatcctgggcttcgctttcggcgacgggtacctcggggagatgggcgggaggctcacactgactttctacggcaaggaggagacgctccgggagctgaagaaggacctggagcgcctgggcatttcggccaacctctacgtgcgcgagtctatcgagacaactagcggccactcggaggggaagtccctcagcatcgagctgcgcgtcacatcgaggtctttcgcgctcttcctggagaagctcggcatgccgagggggaagaagactgagaaggcgtacagggtgccaggctggatcctggaggctcctctgtgggtcaagaggaacttcctcgctgggctgttcgctgctgacggctcgattgtcgagttcaagggcaacaccccgctccccatcaatctgacgcagtcaaagtccgacgagctcgccgagaatctggtggagttcctcggggatgtcgccaagctcctggcggagttcggcatcgagaccacgctgtacgaggttaagtccaagaagggggtgacctaccgcctctctattgtcggcgaggactcaatcaggacgttcgttgagcggatcaattacgagtacgatcccgagaagaaggtgaagggcctgattgctgccgcgtacctcaagctgaaggagaggatcgtgaaggaggcgcatgaggctgtcaaggacgatttcccaaccttcgaggagttcgctaaggagaggggctacgagggcgggttcgtcgctgagaaggtggtcaaggtcgagagggttaagcctgagtacacgaagttctacgatattggggtttaccatgaggctcacaacttcattgctaatggcatcgtcgttcacaactccattgtggggacagccacgttcgatcagtactggagcgtgcgcacctctaagcggacttcaggaacagtgaccgtgaccgatcacttccgcgcctgggcgaaccggggcctgaacctcggcacaatagaccaaattacattgtgcgtggagggttaccaaagctctggatcagccaacatcacccagaacaccttctctcagggctcttcttccggcagttcgggtggctcatccggctccacaacgactactcgcatcgagtgtgagaacatgtccttgtccggaccctacgttagcaggatcaccaatccctttaatggtattgcgctgtacgccaacggagacacagcccgcgctaccgttaacttccccgcaagtcgcaactacaatttccgcctgcggggttgcggcaacaacaataatcttgcccgtgtggacctgaggatcgacggacggaccgtcgggaccttttattaccagggcacatacccctgggaggccccaattgacaatgtttatgtcagtgcggggagtcatacagtcgaaatcactgttactgcggataacggcacatgggacgtgtatgccgactacctggtgatacagtgactcgagggggggcccggtacccaattcgccctatagtgagtcgtattacaattcactggccgtcgttttacaacgtcgtgactgggaaaaccctggcgttacccaacttaatcgccttgcagcacatccccctttcgccagctggcgtaatagcgaagaggcccgcaccgatcgcccttcccaacagttgcgcagcctgaatggcgaatggaaattgtaagcgttaatattttgttaaaattcgcgttaaatttttgttaaatcagctcattttttaaccaataggccgaaatcggcaaaatcccttataaatcaaaagaatagaccgagatagggttgagtgttgttccagtttggaacaagagtccactattaaagaacgtggactccaacgtcaaagggcgaaaaaccgtctatcagggcgatggcccactacgtgaaccatcaccctaatcaagttttttggggtcgaggtgccgtaaagcactaaatcggaaccctaaagggagcccccgatttagagcttgacggggaaagccggcgaacgtggcgagaaaggaagggaagaaagcgaaaggagcgggcgctagggcgctggcaagtgtagcggtcacgctgcgcgtaaccaccacacccgccgcgcttaatgcgccgctacagggcgcgtcaggtg

SEQ ID NO: 3092 - DNA, 5117 bp, Artificial Sequence
  Synthetic Construct, AS-92 intein modified protein encoding nucleic acids in pBluescript
gcacttttcggggaaatgtgcgcggaacccctatttgtttatttttctaaatacattcaaatatgtatccgctcatgagacaataaccctgataaatgcttcaataatattgaaaaaggaagagtatgagtattcaacatttccgtgtcgcccttattcccttttttgcggcattttgccttcctgtttttgctcacccagaaacgctggtgaaagtaaaagatgctgaagatcagttgggtgcacgagtgggttacatcgaactggatctcaacagcggtaagatccttgagagttttcgccccgaagaacgttttccaatgatgagcacttttaaagttctgctatgtggcgcggtattatcccgtattgacgccgggcaagagcaactcggtcgccgcatacactattctcagaatgacttggttgagtactcaccagtcacagaaaagcatcttacggatggcatgacagtaagagaattatgcagtgctgccataaccatgagtgataacactgcggccaacttacttctgacaacgatcggaggaccgaaggagctaaccgcttttttgcacaacatgggggatcatgtaactcgccttgatcgttgggaaccggagctgaatgaagccataccaaacgacgagcgtgacaccacgatgcctgtagcaatggcaacaacgttgcgcaaactattaactggcgaactacttactctagcttcccggcaacaattaatagactggatggaggcggataaagttgcaggaccacttctgcgctcggcccttccggctggctggtttattgctgataaatctggagccggtgagcgtgggtctcgcggtatcattgcagcactggggccagatggtaagccctcccgtatcgtagttatctacacgacggggagtcaggcaactatggatgaacgaaatagacagatcgctgagataggtgcctcactgattaagcattggtaactgtcagaccaagtttactcatatatactttagattgatttaaaacttcatttttaatttaaaaggatctaggtgaagatcctttttgataatctcatgaccaaaatcccttaacgtgagttttcgttccactgagcgtcagaccccgtagaaaagatcaaaggatcttcttgagatcctttttttctgcgcgtaatctgctgcttgcaaacaaaaaaaccaccgctaccagcggtggtttgtttgccggatcaagagctaccaactctttttccgaaggtaactggcttcagcagagcgcagataccaaatactgtccttctagtgtagccgtagttaggccaccacttcaagaactctgtagcaccgcctacatacctcgctctgctaatcctgttaccagtggctgctgccagtggcgataagtcgtgtcttaccgggttggactcaagacgatagttaccggataaggcgcagcggtcgggctgaacggggggttcgtgcacacagcccagcttggagcgaacgacctacaccgaactgagatacctacagcgtgagctatgagaaagcgccacgcttcccgaagggagaaaggcggacaggtatccggtaagcggcagggtcggaacaggagagcgcacgagggagcttccagggggaaacgcctggtatctttatagtcctgtcgggtttcgccacctctgacttgagcgtcgatttttgtgatgctcgtcaggggggcggagcctatggaaaaacgccagcaacgcggcctttttacggttcctggccttttgctggccttttgctcacatgttctttcctgcgttatcccctgattctgtggataaccgtattaccgcctttgagtgagctgataccgctcgccgcagccgaacgaccgagcgcagcgagtcagtgagcgaggaagcggaagagcgcccaatacgcaaaccgcctctccccgcgcgttggccgattcattaatgcagctggcacgacaggtttcccgactggaaagcgggcagtgagcgcaacgcaattaatgtgagttagctcactcattaggcaccccaggctttacactttatgcttccggctcgtatgttgtgtggaattgtgagcggataacaatttcacacaggaaacagcatatgcaaacaagcattactctgacatccaacgcatccggtacgtttgacggttactattacgaactctggaaggatactggcaatacaacaatgacggtctacactcaaggtcgcttttcctgccagtggtcgaacatcaataacgcgttgtttaggaccgggaagaaatacaaccagaattggcagtctcttggcacaatccggatcacgtactctgcgacttacaacccaaacgggaactcctacttgtgtatctatggctggtctaccaacccattggtcgagttctacatcgttgagtcctgggggaactggagaccgcctggtgccacgtccctgggccaagtgacaatcgatggcgggacctacgacatctataggacgacacgcgtcaaccagccttgcgtggacggggacactctcgtgctgacaaaggagttcgggctcatcaagatcaaggacctctacaagattctggacggcaaggggaagaagacagtgaacggcaatgaggagtggacagagctggagaggccaatcactctgtacggctacaaggacgggaagatcgtcgagattaaggctacccacgtttacaagggcttctccgccgggatgatcgagattcggacccgcacgggccgcaagattaaggtcacgcccatccataagctcttcacaggcagggttactaagaatgggctggagatccgggaggtcatggccaaggacctcaagaagggcgatcggatcattgtggcgaagaagattgatggcggggagcgcgtgaagctgaacatccgcgtcgagcagaagaggggcaagaagatccggattccggacgtcctcgatgagaagctggccgagttcctcggctacctgatcgctgacgggaccctcaagccaaggacggtggccatctacaacaatgatgagtctctcctgcgcagggctaacgagctcgccaatgagctgttcaacattgagggcaagatcgtcaaggggcgcacagttaaggcgctcctgatccactcaaaggctctcgtggagttcttctccaagctgggcgtcccgcgcaacaagaaggccaggacttggaaggtcccgaaggagctcctgatctcagagcccgaggtggtcaaggcgttcattaaggcttacatcatgtgcgacggctactacgatgagaacaagggggagatcgagattgtgaccgctagcgaggaggctgcttacggcttctcgtacctcctggctaagctggggatctacgccatcattcgcgagaagatcattggcgacaaggtctactacagggttgtgatttccggcgagagcaacctggagaagctggggatcgagagggttggccgggggtacacgtcgtacgatatcgtcccagttgaggtggaggagctctacaacgctctgggcaggccttacgctgagctgaagagggcgggcatcgagattcataattacctctcgggggagaacatgtcttacgagatgttcaggaagttcgcgaagttcgtcggcatggaggagatcgctgagaaccacctcacccatgttctgttcgacgagatcgtggagattcggtacatctccgagggccaggaggtgtacgacgttactacggagactcataatttcattgggggcaacatgcctactctgctccacaactccattgtggggacagccacgttcgatcagtactggagcgtgcgcacctctaagcggacttcaggaacagtgaccgtgaccgatcacttccgcgcctgggcgaaccggggcctgaacctcggcacaatagaccaaattacattgtgcgtggagggttaccaaagctctggatcagccaacatcacccagaacaccttctctcagggctcttcttccggcagttcgggtggctcatccggctccacaacgactactcgcatcgagtgtgagaacatgtccttgtccggaccctacgttagcaggatcaccaatccctttaatggtattgcgctgtacgccaacggagacacagcccgcgctaccgttaacttccccgcaagtcgcaactacaatttccgcctgcggggttgcggcaacaacaataatcttgcccgtgtggacctgaggatcgacggacggaccgtcgggaccttttattaccagggcacatacccctgggaggccccaattgacaatgtttatgtcagtgcggggagtcatacagtcgaaatcactgttactgcggataacggcacatgggacgtgtatgccgactacctggtgatacagtgactcgagggggggcccggtacccaattcgccctatagtgagtcgtattacaattcactggccgtcgttttacaacgtcgtgactgggaaaaccctggcgttacccaacttaatcgccttgcagcacatccccctttcgccagctggcgtaatagcgaagaggcccgcaccgatcgcccttcccaacagttgcgcagcctgaatggcgaatggaaattgtaagcgttaatattttgttaaaattcgcgttaaatttttgttaaatcagctcattttttaaccaataggccgaaatcggcaaaatcccttataaatcaaaagaatagaccgagatagggttgagtgttgttccagtttggaacaagagtccactattaaagaacgtggactccaacgtcaaagggcgaaaaaccgtctatcagggcgatggcccactacgtgaaccatcaccctaatcaagttttttggggtcgaggtgccgtaaagcactaaatcggaaccctaaagggagcccccgatttagagcttgacggggaaagccggcgaacgtggcgagaaaggaagggaagaaagcgaaaggagcgggcgctagggcgctggcaagtgtagcggtcacgctgcgcgtaaccaccacacccgccgcgcttaatgcgccgctacagggcgcgtcaggtg

SEQ ID NO: 3093 - DNA, 5777 bp, Artificial Sequence
  Synthetic Construct, AS-93 intein modified protein encoding nucleic acids in pBluescript
gcacttttcggggaaatgtgcgcggaacccctatttgtttatttttctaaatacattcaaatatgtatccgctcatgagacaataaccctgataaatgcttcaataatattgaaaaaggaagagtatgagtattcaacatttccgtgtcgcccttattcccttttttgcggcattttgccttcctgtttttgctcacccagaaacgctggtgaaagtaaaagatgctgaagatcagttgggtgcacgagtgggttacatcgaactggatctcaacagcggtaagatccttgagagttttcgccccgaagaacgttttccaatgatgagcacttttaaagttctgctatgtggcgcggtattatcccgtattgacgccgggcaagagcaactcggtcgccgcatacactattctcagaatgacttggttgagtactcaccagtcacagaaaagcatcttacggatggcatgacagtaagagaattatgcagtgctgccataaccatgagtgataacactgcggccaacttacttctgacaacgatcggaggaccgaaggagctaaccgcttttttgcacaacatgggggatcatgtaactcgccttgatcgttgggaaccggagctgaatgaagccataccaaacgacgagcgtgacaccacgatgcctgtagcaatggcaacaacgttgcgcaaactattaactggcgaactacttactctagcttcccggcaacaattaatagactggatggaggcggataaagttgcaggaccacttctgcgctcggcccttccggctggctggtttattgctgataaatctggagccggtgagcgtgggtctcgcggtatcattgcagcactggggccagatggtaagccctcccgtatcgtagttatctacacgacggggagtcaggcaactatggatgaacgaaatagacagatcgctgagataggtgcctcactgattaagcattggtaactgtcagaccaagtttactcatatatactttagattgatttaaaacttcatttttaatttaaaaggatctaggtgaagatcctttttgataatctcatgaccaaaatcccttaacgtgagttttcgttccactgagcgtcagaccccgtagaaaagatcaaaggatcttcttgagatcctttttttctgcgcgtaatctgctgcttgcaaacaaaaaaaccaccgctaccagcggtggtttgtttgccggatcaagagctaccaactctttttccgaaggtaactggcttcagcagagcgcagataccaaatactgtccttctagtgtagccgtagttaggccaccacttcaagaactctgtagcaccgcctacatacctcgctctgctaatcctgttaccagtggctgctgccagtggcgataagtcgtgtcttaccgggttggactcaagacgatagttaccggataaggcgcagcggtcgggctgaacggggggttcgtgcacacagcccagcttggagcgaacgacctacaccgaactgagatacctacagcgtgagctatgagaaagcgccacgcttcccgaagggagaaaggcggacaggtatccggtaagcggcagggtcggaacaggagagcgcacgagggagcttccagggggaaacgcctggtatctttatagtcctgtcgggtttcgccacctctgacttgagcgtcgatttttgtgatgctcgtcaggggggcggagcctatggaaaaacgccagcaacgcggcctttttacggttcctggccttttgctggccttttgctcacatgttctttcctgcgttatcccctgattctgtggataaccgtattaccgcctttgagtgagctgataccgctcgccgcagccgaacgaccgagcgcagcgagtcagtgagcgaggaagcggaagagcgcccaatacgcaaaccgcctctccccgcgcgttggccgattcattaatgcagctggcacgacaggtttcccgactggaaagcgggcagtgagcgcaacgcaattaatgtgagttagctcactcattaggcaccccaggctttacactttatgcttccggctcgtatgttgtgtggaattgtgagcggataacaatttcacacaggaaacagcatatgcaaacaagcattactctgacatccaacgcatccggtacgtttgacggttactattacgaactctggaaggatactggcaatacaacaatgacggtctacactcaaggtcgcttttcctgccagtggtcgaacatcaataacgcgttgtttaggaccgggaagaaatacaaccagaattggcagtctcttggcacaatccggatcacgtactctgcgacttacaacccaaacgggaactcctacttgtgtatctatggctggtctaccaacccattggtcgagttctacatcgttgagtcctgggggaactggagaccgcctggtgccacgtccctgggccaagtgacaatcgatggcgggacctacgacatctataggacgacacgcgtcaaccagccttgcctctcgccagatactatggttcgcactactaacggggacaagccaatcagggacatcgcggtcggggatcagctcttcgatcacgaggacaggccagtgcagtgcctcgctgctgaggctatccagacctcccggatgatgaaggttacctacacgggctacaacagcgtgtcgaagtccagcttcacatgcactccagaccacatcatgaccctcgttgcgtacggggtgaagcctttccgccattctaactcaaatagggtgacctggtggacgaggtgcgacaggacggagctgggcgctgatgctgtcgagatcaagtgggatgctgccatgcacgacctctacacagagtaccgcgagcagctgggcaggaggccaactgacgctgaggtccggaagtacctcaaggctatcaccagcacgcgcgtggtcccagattcggaggacgatgactctcagagggtcgaggagacgtaccagtcgcccgttctcattaagctcctggcgaagctgaaggctatggatgtggacgtcgatggcgaggacgagtctgttgtgctcatgctcctgcagcagcacatggaggactacctggagcacatgatcccagagcctgaggatatttccgacgaggataacgatgacctcatcattgacctggatacaaataggaagcggaagatcggcacaatttctactctgtcgtctcgcatctcagacaagactttcaggcagtccccgagcattaagtcatcccccgtgaactctcagcagcagtcacagaatgaggcttcgcagtctaccgtcccgacgtacgcctcggttctcaccgaggatgaccaccgcgagatgttcgcgccagtgcggtcaaagctggctgtccgcgaccctaagtgcaagtgccagaacctctcctgcaagggcctgaggcgcgtcagcacagttttcgagacttcggagcaggctgacctggctctggagctcctgagcggggatcactaccgcgtcgttgacccatgcgccgtgcaggatatggaggtcttcacaatgactctggaggagtaccaggctacctgcacggctcctatgacgcagcataagtccaagctgcgcctctacaggagcccgctcaggttccagccataccagggctcagtgtccccagtcccaatcgacccgttctggttcgggttctggctgggcaacgggaccaagaacaattccgagattacaagcactgatcccgaggttgaggtgtacacgcaggcgctcgtggataggctgaatagggactcgatcccaccaggcaaggctccactgaaggtctctaagtacaagatcgacattggcaccaagcacgtgtacaagggggaggagatcaagaccacgaaggtcgcccatcgcctcagggtcatgagcaccgtttcgaacctggacaagacgcactggaatccagtgcatgatggcctgagggagctcggcctcctgggggacaagtccggcgggatccctgactgctacatgaacgcggatgagaatacaaggctggctgtgctcgccggcctgattgagtcagacggctggctctcccacgggctgaactgctacggcttcgggcagtacacctacgagctcaagaagctggtcgaggacgctcggaagctggctctctcctgcggcatccagtgcaaccccattttcgagaggaagaatggcaaggatcggccagagcctgggtggttcttctacatgggcaggggggtcgagaagttccagccacatctcctgctccctcggaagcgcatgaccatcccgttcacaactagcaagaacagggacgttcggccattcgacgtggaggatgctggcgacggggagttcaggctcattgaggtttcaggggagctcttccagctcgcggataggactgtggttcataattccattgtggggacagccacgttcgatcagtactggagcgtgcgcacctctaagcggacttcaggaacagtgaccgtgaccgatcacttccgcgcctgggcgaaccggggcctgaacctcggcacaatagaccaaattacattgtgcgtggagggttaccaaagctctggatcagccaacatcacccagaacaccttctctcagggctcttcttccggcagttcgggtggctcatccggctccacaacgactactcgcatcgagtgtgagaacatgtccttgtccggaccctacgttagcaggatcaccaatccctttaatggtattgcgctgtacgccaacggagacacagcccgcgctaccgttaacttccccgcaagtcgcaactacaatttccgcctgcggggttgcggcaacaacaataatcttgcccgtgtggacctgaggatcgacggacggaccgtcgggaccttttattaccagggcacatacccctgggaggccccaattgacaatgtttatgtcagtgcggggagtcatacagtcgaaatcactgttactgcggataacggcacatgggacgtgtatgccgactacctggtgatacagtgactcgagggggggcccggtacccaattcgccctatagtgagtcgtattacaattcactggccgtcgttttacaacgtcgtgactgggaaaaccctggcgttacccaacttaatcgccttgcagcacatccccctttcgccagctggcgtaatagcgaagaggcccgcaccgatcgcccttcccaacagttgcgcagcctgaatggcgaatggaaattgtaagcgttaatattttgttaaaattcgcgttaaatttttgttaaatcagctcattttttaaccaataggccgaaatcggcaaaatcccttataaatcaaaagaatagaccgagatagggttgagtgttgttccagtttggaacaagagtccactattaaagaacgtggactccaacgtcaaagggcgaaaaaccgtctatcagggcgatggcccactacgtgaaccatcaccctaatcaagttttttggggtcgaggtgccgtaaagcactaaatcggaaccctaaagggagcccccgatttagagcttgacggggaaagccggcgaacgtggcgagaaaggaagggaagaaagcgaaaggagcgggcgctagggcgctggcaagtgtagcggtcacgctgcgcgtaaccaccacacccgccgcgcttaatgcgccgctacagggcgcgtcaggtg

SEQ ID NO: 3094 - DNA, 5549 bp, Artificial Sequence
  Synthetic Construct, AS-94 intein modified protein encoding nucleic acids in pBluescript
gcacttttcggggaaatgtgcgcggaacccctatttgtttatttttctaaatacattcaaatatgtatccgctcatgagacaataaccctgataaatgcttcaataatattgaaaaaggaagagtatgagtattcaacatttccgtgtcgcccttattcccttttttgcggcattttgccttcctgtttttgctcacccagaaacgctggtgaaagtaaaagatgctgaagatcagttgggtgcacgagtgggttacatcgaactggatctcaacagcggtaagatccttgagagttttcgccccgaagaacgttttccaatgatgagcacttttaaagttctgctatgtggcgcggtattatcccgtattgacgccgggcaagagcaactcggtcgccgcatacactattctcagaatgacttggttgagtactcaccagtcacagaaaagcatcttacggatggcatgacagtaagagaattatgcagtgctgccataaccatgagtgataacactgcggccaacttacttctgacaacgatcggaggaccgaaggagctaaccgcttttttgcacaacatgggggatcatgtaactcgccttgatcgttgggaaccggagctgaatgaagccataccaaacgacgagcgtgacaccacgatgcctgtagcaatggcaacaacgttgcgcaaactattaactggcgaactacttactctagcttcccggcaacaattaatagactggatggaggcggataaagttgcaggaccacttctgcgctcggcccttccggctggctggtttattgctgataaatctggagccggtgagcgtgggtctcgcggtatcattgcagcactggggccagatggtaagccctcccgtatcgtagttatctacacgacggggagtcaggcaactatggatgaacgaaatagacagatcgctgagataggtgcctcactgattaagcattggtaactgtcagaccaagtttactcatatatactttagattgatttaaaacttcatttttaatttaaaaggatctaggtgaagatcctttttgataatctcatgaccaaaatcccttaacgtgagttttcgttccactgagcgtcagaccccgtagaaaagatcaaaggatcttcttgagatcctttttttctgcgcgtaatctgctgcttgcaaacaaaaaaaccaccgctaccagcggtggtttgtttgccggatcaagagctaccaactctttttccgaaggtaactggcttcagcagagcgcagataccaaatactgtccttctagtgtagccgtagttaggccaccacttcaagaactctgtagcaccgcctacatacctcgctctgctaatcctgttaccagtggctgctgccagtggcgataagtcgtgtcttaccgggttggactcaagacgatagttaccggataaggcgcagcggtcgggctgaacggggggttcgtgcacacagcccagcttggagcgaacgacctacaccgaactgagatacctacagcgtgagctatgagaaagcgccacgcttcccgaagggagaaaggcggacaggtatccggtaagcggcagggtcggaacaggagagcgcacgagggagcttccagggggaaacgcctggtatctttatagtcctgtcgggtttcgccacctctgacttgagcgtcgatttttgtgatgctcgtcaggggggcggagcctatggaaaaacgccagcaacgcggcctttttacggttcctggccttttgctggccttttgctcacatgttctttcctgcgttatcccctgattctgtggataaccgtattaccgcctttgagtgagctgataccgctcgccgcagccgaacgaccgagcgcagcgagtcagtgagcgaggaagcggaagagcgcccaatacgcaaaccgcctctccccgcgcgttggccgattcattaatgcagctggcacgacaggtttcccgactggaaagcgggcagtgagcgcaacgcaattaatgtgagttagctcactcattaggcaccccaggctttacactttatgcttccggctcgtatgttgtgtggaattgtgagcggataacaatttcacacaggaaacagcatatgcaaacaagcattactctgacatccaacgcatccggtacgtttgacggttactattacgaactctggaaggatactggcaatacaacaatgacggtctacactcaaggtcgcttttcctgccagtggtcgaacatcaataacgcgttgtttaggaccgggaagaaatacaaccagaattggcagtctcttggcacaatccggatcacgtactctgcgacttacaacccaaacgggaactcctacttgtgtatctatggctggtctaccaacccattggtcgagttctacatcgttgagtcctgggggaactggagaccgcctggtgccacgtccctgggccaagtgacaatcgatggcgggacctacgacatctataggacgacacgcgtcaaccagccttgcctcgctaaggggacactgctgctgcgctacgatgggacaaaggtggaggtggagaatgttcgggagggggatctgctgctgggcccagacggcgggcctaggagggcgttcaacattgtgggcgggagggaccggctctacaggatcaagatggagggcgggaaggaggatctggtggtcaccccaaatcacatcctggtcctccatcgcgagaagagggacggcgtcgataaggtttacgctaggccattcgctctcccactcctgcaggaggacgccaccgacgatggcgaggatctgtcggagatctctgcgattgagcacttcgacaccatggagatcacggctgctgacttcgcttccctcgatccgaacgagcgcaagctgtacaggctcttcacgagcccaggctacgagctgaatgggaggccagtgcccattgacccgtacttcctgggcctctggctgggggatcgctccaggaccaagtccagcatctacacgaaccacgaggaggagatccgggagttcattgcggaccatgctgccgagctcgatctgcagctcgtgtcatacgtctccaatcgcccatccctcgcggctatgaagaacggcaatcagctgcctctcaggcaccaggctaggcagacgatcaggaagcagcgcattgccgcgaagagcatcacacagccaggcggggctaggtcgtcttcataccctgccaccaacggcgggctgtccagcaatacagtgactagcctccactcgcgggagcgccatccactgtccgagtcgtctgctgccgcgacgatgaacctcctgccacgctccacaagcgtctcgacttctgttgctgcccagcctaagtcatccatgagcacattcatcactgacgctattctcccttcggagagctcgaacatctctgtcatttcagattccggcatcgagattagcaagtcttcaaagatgctgtcggaggaggaggccgacctggatctcttcgacattgattcggaggacgaggagatcgaggacctcgatgagaagaagaacgttagcaatgtggacgagttcccgaagcggcgcaggatccactacctgaggaccggctgccggacgtacggggagctctgcccaggcgaggaggaccagatcctggaggatattgttggcaggccagacgggaccacgtctgtggagtcactcctgctcgctctggaggctctggggctccatacctgcggcacgaacgacagcgggtcggataagaagcggatcccctcagtgtacatgaagaactcccgcgccgtgcgcctggctctgctcgctggcctcatcgactctggcgggtggtatgtggattcagagaacacattcggcttcagccagactgaggactctaattcaaccctgatctgggatgttgtgaccctggctaggagcctcggcttctccgtcagcacaaagcggcgcatgactcacaagccgaccaggacgcagcataaggcgcaggagttcgctcagatttcgggcaacgtcgcggagatcccatctctgctcgctagggagaggggcgttgagaggccaatctcccaggcgcacagcttcaagatcaaggacattcagctggagacagaggccactgagtgggcggggttcagggtggatcaggatcagctctacctcaggcatgacttcctcgttctgcataattccattgtggggacagccacgttcgatcagtactggagcgtgcgcacctctaagcggacttcaggaacagtgaccgtgaccgatcacttccgcgcctgggcgaaccggggcctgaacctcggcacaatagaccaaattacattgtgcgtggagggttaccaaagctctggatcagccaacatcacccagaacaccttctctcagggctcttcttccggcagttcgggtggctcatccggctccacaacgactactcgcatcgagtgtgagaacatgtccttgtccggaccctacgttagcaggatcaccaatccctttaatggtattgcgctgtacgccaacggagacacagcccgcgctaccgttaacttccccgcaagtcgcaactacaatttccgcctgcggggttgcggcaacaacaataatcttgcccgtgtggacctgaggatcgacggacggaccgtcgggaccttttattaccagggcacatacccctgggaggccccaattgacaatgtttatgtcagtgcggggagtcatacagtcgaaatcactgttactgcggataacggcacatgggacgtgtatgccgactacctggtgatacagtgactcgagggggggcccggtacccaattcgccctatagtgagtcgtattacaattcactggccgtcgttttacaacgtcgtgactgggaaaaccctggcgttacccaacttaatcgccttgcagcacatccccctttcgccagctggcgtaatagcgaagaggcccgcaccgatcgcccttcccaacagttgcgcagcctgaatggcgaatggaaattgtaagcgttaatattttgttaaaattcgcgttaaatttttgttaaatcagctcattttttaaccaataggccgaaatcggcaaaatcccttataaatcaaaagaatagaccgagatagggttgagtgttgttccagtttggaacaagagtccactattaaagaacgtggactccaacgtcaaagggcgaaaaaccgtctatcagggcgatggcccactacgtgaaccatcaccctaatcaagttttttggggtcgaggtgccgtaaagcactaaatcggaaccctaaagggagcccccgatttagagcttgacggggaaagccggcgaacgtggcgagaaaggaagggaagaaagcgaaaggagcgggcgctagggcgctggcaagtgtagcggtcacgctgcgcgtaaccaccacacccgccgcgcttaatgcgccgctacagggcgcgtcaggtg

SEQ ID NO: 3095 - DNA, 4313 bp, Artificial Sequence
  Synthetic Construct, AS-95 intein modified protein encoding nucleic acids in pBluescript
gcacttttcggggaaatgtgcgcggaacccctatttgtttatttttctaaatacattcaaatatgtatccgctcatgagacaataaccctgataaatgcttcaataatattgaaaaaggaagagtatgagtattcaacatttccgtgtcgcccttattcccttttttgcggcattttgccttcctgtttttgctcacccagaaacgctggtgaaagtaaaagatgctgaagatcagttgggtgcacgagtgggttacatcgaactggatctcaacagcggtaagatccttgagagttttcgccccgaagaacgttttccaatgatgagcacttttaaagttctgctatgtggcgcggtattatcccgtattgacgccgggcaagagcaactcggtcgccgcatacactattctcagaatgacttggttgagtactcaccagtcacagaaaagcatcttacggatggcatgacagtaagagaattatgcagtgctgccataaccatgagtgataacactgcggccaacttacttctgacaacgatcggaggaccgaaggagctaaccgcttttttgcacaacatgggggatcatgtaactcgccttgatcgttgggaaccggagctgaatgaagccataccaaacgacgagcgtgacaccacgatgcctgtagcaatggcaacaacgttgcgcaaactattaactggcgaactacttactctagcttcccggcaacaattaatagactggatggaggcggataaagttgcaggaccacttctgcgctcggcccttccggctggctggtttattgctgataaatctggagccggtgagcgtgggtctcgcggtatcattgcagcactggggccagatggtaagccctcccgtatcgtagttatctacacgacggggagtcaggcaactatggatgaacgaaatagacagatcgctgagataggtgcctcactgattaagcattggtaactgtcagaccaagtttactcatatatactttagattgatttaaaacttcatttttaatttaaaaggatctaggtgaagatcctttttgataatctcatgaccaaaatcccttaacgtgagttttcgttccactgagcgtcagaccccgtagaaaagatcaaaggatcttcttgagatcctttttttctgcgcgtaatctgctgcttgcaaacaaaaaaaccaccgctaccagcggtggtttgtttgccggatcaagagctaccaactctttttccgaaggtaactggcttcagcagagcgcagataccaaatactgtccttctagtgtagccgtagttaggccaccacttcaagaactctgtagcaccgcctacatacctcgctctgctaatcctgttaccagtggctgctgccagtggcgataagtcgtgtcttaccgggttggactcaagacgatagttaccggataaggcgcagcggtcgggctgaacggggggttcgtgcacacagcccagcttggagcgaacgacctacaccgaactgagatacctacagcgtgagctatgagaaagcgccacgcttcccgaagggagaaaggcggacaggtatccggtaagcggcagggtcggaacaggagagcgcacgagggagcttccagggggaaacgcctggtatctttatagtcctgtcgggtttcgccacctctgacttgagcgtcgatttttgtgatgctcgtcaggggggcggagcctatggaaaaacgccagcaacgcggcctttttacggttcctggccttttgctggccttttgctcacatgttctttcctgcgttatcccctgattctgtggataaccgtattaccgcctttgagtgagctgataccgctcgccgcagccgaacgaccgagcgcagcgagtcagtgagcgaggaagcggaagagcgcccaatacgcaaaccgcctctccccgcgcgttggccgattcattaatgcagctggcacgacaggtttcccgactggaaagcgggcagtgagcgcaacgcaattaatgtgagttagctcactcattaggcaccccaggctttacactttatgcttccggctcgtatgttgtgtggaattgtgagcggataacaatttcacacaggaaacagcatatgcaaacaagcattactctgacatccaacgcatccggtacgtttgacggttactattacgaactctggaaggatactggcaatacaacaatgacggtctacactcaaggtcgcttttcctgccagtggtcgaacatcaataacgcgttgtttaggaccgggaagaaatacaaccagaattggcagtctcttggcacaatccggatcacgtactctgcgacttacaacccaaacgggaactcctacttgtgtatctatggctggtctaccaacccattggtcgagttctacatcgttgagtcctgggggaactggagaccgcctggtgccacgtccctgggccaagtgacaatcgatggcgggacctacgacatctataggacgacacgcgtcaaccagccttgcctcgctaaggggacaaggctgctgcgctacgatgggacagagatcaacgtggaggacgtgcgggagggggatcagctgctcgggccagacggcgagccaaggagggcgttcaacatcgtttccggcattgaccggctctaccgcgtgaagatcggcggggagaaggaggatctcgtggtcaccccgaaccacattctggtgttctacagggagggcccatccgatgggcctgagaatgcggagcggcagacagtcgagatcactgccgcggagttcgctaccctcagcacggaggagcgctccctgtacagcgcgttcacctcgccagctgtcgagaagggcgctgaggggtcagctgctcagatgcattccttcaaggttgaggacatttcgctggagtctgagaagacggagtgggccggcttcagggtggataaggatcagctctacctcaggcatgattacctcgttctgcataactccattgtggggacagccacgttcgatcagtactggagcgtgcgcacctctaagcggacttcaggaacagtgaccgtgaccgatcacttccgcgcctgggcgaaccggggcctgaacctcggcacaatagaccaaattacattgtgcgtggagggttaccaaagctctggatcagccaacatcacccagaacaccttctctcagggctcttcttccggcagttcgggtggctcatccggctccacaacgactactcgcatcgagtgtgagaacatgtccttgtccggaccctacgttagcaggatcaccaatccctttaatggtattgcgctgtacgccaacggagacacagcccgcgctaccgttaacttccccgcaagtcgcaactacaatttccgcctgcggggttgcggcaacaacaataatcttgcccgtgtggacctgaggatcgacggacggaccgtcgggaccttttattaccagggcacatacccctgggaggccccaattgacaatgtttatgtcagtgcggggagtcatacagtcgaaatcactgttactgcggataacggcacatgggacgtgtatgccgactacctggtgatacagtgactcgagggggggcccggtacccaattcgccctatagtgagtcgtattacaattcactggccgtcgttttacaacgtcgtgactgggaaaaccctggcgttacccaacttaatcgccttgcagcacatccccctttcgccagctggcgtaatagcgaagaggcccgcaccgatcgcccttcccaacagttgcgcagcctgaatggcgaatggaaattgtaagcgttaatattttgttaaaattcgcgttaaatttttgttaaatcagctcattttttaaccaataggccgaaatcggcaaaatcccttataaatcaaaagaatagaccgagatagggttgagtgttgttccagtttggaacaagagtccactattaaagaacgtggactccaacgtcaaagggcgaaaaaccgtctatcagggcgatggcccactacgtgaaccatcaccctaatcaagttttttggggtcgaggtgccgtaaagcactaaatcggaaccctaaagggagcccccgatttagagcttgacggggaaagccggcgaacgtggcgagaaaggaagggaagaaagcgaaaggagcgggcgctagggcgctggcaagtgtagcggtcacgctgcgcgtaaccaccacacccgccgcgcttaatgcgccgctacagggcgcgtcaggtg

SEQ ID NO: 3096 - DNA, 4931 bp, Artificial Sequence
  Synthetic Construct, AS-96 intein modified protein encoding nucleic acids in pBluescript
gcacttttcggggaaatgtgcgcggaacccctatttgtttatttttctaaatacattcaaatatgtatccgctcatgagacaataaccctgataaatgcttcaataatattgaaaaaggaagagtatgagtattcaacatttccgtgtcgcccttattcccttttttgcggcattttgccttcctgtttttgctcacccagaaacgctggtgaaagtaaaagatgctgaagatcagttgggtgcacgagtgggttacatcgaactggatctcaacagcggtaagatccttgagagttttcgccccgaagaacgttttccaatgatgagcacttttaaagttctgctatgtggcgcggtattatcccgtattgacgccgggcaagagcaactcggtcgccgcatacactattctcagaatgacttggttgagtactcaccagtcacagaaaagcatcttacggatggcatgacagtaagagaattatgcagtgctgccataaccatgagtgataacactgcggccaacttacttctgacaacgatcggaggaccgaaggagctaaccgcttttttgcacaacatgggggatcatgtaactcgccttgatcgttgggaaccggagctgaatgaagccataccaaacgacgagcgtgacaccacgatgcctgtagcaatggcaacaacgttgcgcaaactattaactggcgaactacttactctagcttcccggcaacaattaatagactggatggaggcggataaagttgcaggaccacttctgcgctcggcccttccggctggctggtttattgctgataaatctggagccggtgagcgtgggtctcgcggtatcattgcagcactggggccagatggtaagccctcccgtatcgtagttatctacacgacggggagtcaggcaactatggatgaacgaaatagacagatcgctgagataggtgcctcactgattaagcattggtaactgtcagaccaagtttactcatatatactttagattgatttaaaacttcatttttaatttaaaaggatctaggtgaagatcctttttgataatctcatgaccaaaatcccttaacgtgagttttcgttccactgagcgtcagaccccgtagaaaagatcaaaggatcttcttgagatcctttttttctgcgcgtaatctgctgcttgcaaacaaaaaaaccaccgctaccagcggtggtttgtttgccggatcaagagctaccaactctttttccgaaggtaactggcttcagcagagcgcagataccaaatactgtccttctagtgtagccgtagttaggccaccacttcaagaactctgtagcaccgcctacatacctcgctctgctaatcctgttaccagtggctgctgccagtggcgataagtcgtgtcttaccgggttggactcaagacgatagttaccggataaggcgcagcggtcgggctgaacggggggttcgtgcacacagcccagcttggagcgaacgacctacaccgaactgagatacctacagcgtgagctatgagaaagcgccacgcttcccgaagggagaaaggcggacaggtatccggtaagcggcagggtcggaacaggagagcgcacgagggagcttccagggggaaacgcctggtatctttatagtcctgtcgggtttcgccacctctgacttgagcgtcgatttttgtgatgctcgtcaggggggcggagcctatggaaaaacgccagcaacgcggcctttttacggttcctggccttttgctggccttttgctcacatgttctttcctgcgttatcccctgattctgtggataaccgtattaccgcctttgagtgagctgataccgctcgccgcagccgaacgaccgagcgcagcgagtcagtgagcgaggaagcggaagagcgcccaatacgcaaaccgcctctccccgcgcgttggccgattcattaatgcagctggcacgacaggtttcccgactggaaagcgggcagtgagcgcaacgcaattaatgtgagttagctcactcattaggcaccccaggctttacactttatgcttccggctcgtatgttgtgtggaattgtgagcggataacaatttcacacaggaaacagcatatgcaaacaagcattactctgacatccaacgcatccggtacgtttgacggttactattacgaactctggaaggatactggcaatacaacaatgacggtctacactcaaggtcgcttttcctgccagtggtcgaacatcaataacgcgttgtttaggaccgggaagaaatacaaccagaattggcagtctcttggcacaatccggatcacgtactctgcgacttacaacccaaacgggaactcctacttgtgtatctatggctggtctaccaacccattggtcgagttctacatcgttgagtcctgggggaactggagaccgcctggtgccacgtccctgggccaagtgacaatcgatggcgggacctacgacatctataggacgacacgcgtcaaccagccttgcgtcgcgccagattcgctcgtggtcgtcaatgataaggttcaggagatcggcaagctgacagaggagtgggggcgggaggtcgggttcctggagtactccagcggcatcttctacgctccgtacctcggcagggggatttcactggacctcgttacagggaaggtgaagccgtctgtggtctcaaaagtgtggaagctgaagtcccccgaggagctcgtcaccatcaagaccattacgggcaaggagatcacagtgactccagagaccaagctcctgacgttcaacgggacactggagtggaaggaggcgggcaagatcaagcctggggattacgtgctgactgtcaagaagctccacatcaatggcaagcaggagaccctggacgagaagctcgcctacaagagggggctgagcctctcggatccactggagttcttctcctcctccgagaggactatctccgcgtacctgaagggcattttcgacaaggtcggcaggctcgttggggataccgccgttatcaaggtggacaaggatatggcgaagaggctgcagatcctcctgctcaggctcggcattgtctccagcgttgacgagacgggcaaggtcatcatcgggcgcgagtacatccagaagattctgggctacaacgtttccgttgtgacgcacgaggtcgagctcttcagggagttcatcgccgagatttccaagttctacggcacaagcgaggaggacgtctactcgtctctgcatgagaagggcgagctcgatatcgggactgtcccagttgagctgcctgagggcctccgggaggagatcaatcgcgagagggctacgtacagcgagctggtgaagatcgcccaggagattaaggacgagaagctgtacaacaagctcgcgtggatcctgtcggaggtcacggaggaggaggctaagattaaggagaaagtgaatacactcaaggtcatcctgtcatccgatctcattccggagcgcgtggagtcggtcaagatcattaagtctccgtacccctacgtgtacgatctcacagtggagggctctcattctttcattgctaatggcttcgtggttcataattccattgtggggacagccacgttcgatcagtactggagcgtgcgcacctctaagcggacttcaggaacagtgaccgtgaccgatcacttccgcgcctgggcgaaccggggcctgaacctcggcacaatagaccaaattacattgtgcgtggagggttaccaaagctctggatcagccaacatcacccagaacaccttctctcagggctcttcttccggcagttcgggtggctcatccggctccacaacgactactcgcatcgagtgtgagaacatgtccttgtccggaccctacgttagcaggatcaccaatccctttaatggtattgcgctgtacgccaacggagacacagcccgcgctaccgttaacttccccgcaagtcgcaactacaatttccgcctgcggggttgcggcaacaacaataatcttgcccgtgtggacctgaggatcgacggacggaccgtcgggaccttttattaccagggcacatacccctgggaggccccaattgacaatgtttatgtcagtgcggggagtcatacagtcgaaatcactgttactgcggataacggcacatgggacgtgtatgccgactacctggtgatacagtgactcgagggggggcccggtacccaattcgccctatagtgagtcgtattacaattcactggccgtcgttttacaacgtcgtgactgggaaaaccctggcgttacccaacttaatcgccttgcagcacatccccctttcgccagctggcgtaatagcgaagaggcccgcaccgatcgcccttcccaacagttgcgcagcctgaatggcgaatggaaattgtaagcgttaatattttgttaaaattcgcgttaaatttttgttaaatcagctcattttttaaccaataggccgaaatcggcaaaatcccttataaatcaaaagaatagaccgagatagggttgagtgttgttccagtttggaacaagagtccactattaaagaacgtggactccaacgtcaaagggcgaaaaaccgtctatcagggcgatggcccactacgtgaaccatcaccctaatcaagttttttggggtcgaggtgccgtaaagcactaaatcggaaccctaaagggagcccccgatttagagcttgacggggaaagccggcgaacgtggcgagaaaggaagggaagaaagcgaaaggagcgggcgctagggcgctggcaagtgtagcggtcacgctgcgcgtaaccaccacacccgccgcgcttaatgcgccgctacagggcgcgtcaggtg

SEQ ID NO: 3097 - DNA, 4991 bp, Artificial Sequence
  Synthetic Construct, AS-97 intein modified protein encoding nucleic acids in pBluescript
gcacttttcggggaaatgtgcgcggaacccctatttgtttatttttctaaatacattcaaatatgtatccgctcatgagacaataaccctgataaatgcttcaataatattgaaaaaggaagagtatgagtattcaacatttccgtgtcgcccttattcccttttttgcggcattttgccttcctgtttttgctcacccagaaacgctggtgaaagtaaaagatgctgaagatcagttgggtgcacgagtgggttacatcgaactggatctcaacagcggtaagatccttgagagttttcgccccgaagaacgttttccaatgatgagcacttttaaagttctgctatgtggcgcggtattatcccgtattgacgccgggcaagagcaactcggtcgccgcatacactattctcagaatgacttggttgagtactcaccagtcacagaaaagcatcttacggatggcatgacagtaagagaattatgcagtgctgccataaccatgagtgataacactgcggccaacttacttctgacaacgatcggaggaccgaaggagctaaccgcttttttgcacaacatgggggatcatgtaactcgccttgatcgttgggaaccggagctgaatgaagccataccaaacgacgagcgtgacaccacgatgcctgtagcaatggcaacaacgttgcgcaaactattaactggcgaactacttactctagcttcccggcaacaattaatagactggatggaggcggataaagttgcaggaccacttctgcgctcggcccttccggctggctggtttattgctgataaatctggagccggtgagcgtgggtctcgcggtatcattgcagcactggggccagatggtaagccctcccgtatcgtagttatctacacgacggggagtcaggcaactatggatgaacgaaatagacagatcgctgagataggtgcctcactgattaagcattggtaactgtcagaccaagtttactcatatatactttagattgatttaaaacttcatttttaatttaaaaggatctaggtgaagatcctttttgataatctcatgaccaaaatcccttaacgtgagttttcgttccactgagcgtcagaccccgtagaaaagatcaaaggatcttcttgagatcctttttttctgcgcgtaatctgctgcttgcaaacaaaaaaaccaccgctaccagcggtggtttgtttgccggatcaagagctaccaactctttttccgaaggtaactggcttcagcagagcgcagataccaaatactgtccttctagtgtagccgtagttaggccaccacttcaagaactctgtagcaccgcctacatacctcgctctgctaatcctgttaccagtggctgctgccagtggcgataagtcgtgtcttaccgggttggactcaagacgatagttaccggataaggcgcagcggtcgggctgaacggggggttcgtgcacacagcccagcttggagcgaacgacctacaccgaactgagatacctacagcgtgagctatgagaaagcgccacgcttcccgaagggagaaaggcggacaggtatccggtaagcggcagggtcggaacaggagagcgcacgagggagcttccagggggaaacgcctggtatctttatagtcctgtcgggtttcgccacctctgacttgagcgtcgatttttgtgatgctcgtcaggggggcggagcctatggaaaaacgccagcaacgcggcctttttacggttcctggccttttgctggccttttgctcacatgttctttcctgcgttatcccctgattctgtggataaccgtattaccgcctttgagtgagctgataccgctcgccgcagccgaacgaccgagcgcagcgagtcagtgagcgaggaagcggaagagcgcccaatacgcaaaccgcctctccccgcgcgttggccgattcattaatgcagctggcacgacaggtttcccgactggaaagcgggcagtgagcgcaacgcaattaatgtgagttagctcactcattaggcaccccaggctttacactttatgcttccggctcgtatgttgtgtggaattgtgagcggataacaatttcacacaggaaacagcatatgcaaacaagcattactctgacatccaacgcatccggtacgtttgacggttactattacgaactctggaaggatactggcaatacaacaatgacggtctacactcaaggtcgcttttcctgccagtggtcgaacatcaataacgcgttgtttaggaccgggaagaaatacaaccagaattggcagtctcttggcacaatccggatcacgtactctgcgacttacaacccaaacgggaactcctacttgtgtatctatggctggtctaccaacccattggtcgagttctacatcgttgagtcctgggggaactggagaccgcctggtgccacgtccctgggccaagtgacaatcgatggcgggacctacgacatctataggacgacacgcgtcaaccagccttgcctgctgccggaggagaaggtcgtgctgcctgagatcgggctggttacgctgcgggagctgttcgagctggctaatgaggtcgttgtcaaggacgaggagaaggaggttcggaagctgggcaagatgctcacaggggttgatgagcgcggcaacgtgaagctcctgaatgccctctacgtgtggagggtcgcgcacaagggcgagatgatccgggttaaggtgaacgggtggtactccgtcaccgttacgccggagcatcccttcctgacgaatagggggtgggtgaaggctggcgagctcaaggagggggactacatcgctattccgcgcagggtctacggcaacgaggatctgatgaagttctcgaagatcgccaaggagctcggcattaagggggacgagaaggagttctacctggccggcgcgtctctcgatatcccgattaaggtgctcttcctggctccctccaagctggtcagcgccttcctccgcggctacttcgacgcgaagggggtggtcagggagaactacatcgaggttccactgttcgaggatctccctctcctgctcctgaggttcggcatcgtctcgcggattgagaagtctaccctcaagatctcaggcaagcgcaacctggagctgttcaggaagcacgtggggttcacggactccgagaaggctaaggccctcgatgagctgatctccaaggccaaggagagcgagaggtacccaattctggaggagctgaggaggctcggcctcctgttcgggttcacacggaacgagctgcgcatcgaggagaatccaacttacgaggtgctgatggagatcctggagcgcattgagaggggctcacctaacctggcggagaagatcgctgtcctggagggccggattaaggaggagaactacctgcgcatcctggaggaggagggcctcattgagaatgggaagctgaccgagctcggcaaggagctcctggaggtctggaggaaccgggagttcgactcgaaggacgttgattacgtgaggaacatcgtggagaatctggtcttcctccccgtcgagaaggttgagcggatcgagtacgagggctacgtctacgacgttactacggagactcataatttcgttgctaatggcatcctcgttcataattccattgtggggacagccacgttcgatcagtactggagcgtgcgcacctctaagcggacttcaggaacagtgaccgtgaccgatcacttccgcgcctgggcgaaccggggcctgaacctcggcacaatagaccaaattacattgtgcgtggagggttaccaaagctctggatcagccaacatcacccagaacaccttctctcagggctcttcttccggcagttcgggtggctcatccggctccacaacgactactcgcatcgagtgtgagaacatgtccttgtccggaccctacgttagcaggatcaccaatccctttaatggtattgcgctgtacgccaacggagacacagcccgcgctaccgttaacttccccgcaagtcgcaactacaatttccgcctgcggggttgcggcaacaacaataatcttgcccgtgtggacctgaggatcgacggacggaccgtcgggaccttttattaccagggcacatacccctgggaggccccaattgacaatgtttatgtcagtgcggggagtcatacagtcgaaatcactgttactgcggataacggcacatgggacgtgtatgccgactacctggtgatacagtgactcgagggggggcccggtacccaattcgccctatagtgagtcgtattacaattcactggccgtcgttttacaacgtcgtgactgggaaaaccctggcgttacccaacttaatcgccttgcagcacatccccctttcgccagctggcgtaatagcgaagaggcccgcaccgatcgcccttcccaacagttgcgcagcctgaatggcgaatggaaattgtaagcgttaatattttgttaaaattcgcgttaaatttttgttaaatcagctcattttttaaccaataggccgaaatcggcaaaatcccttataaatcaaaagaatagaccgagatagggttgagtgttgttccagtttggaacaagagtccactattaaagaacgtggactccaacgtcaaagggcgaaaaaccgtctatcagggcgatggcccactacgtgaaccatcaccctaatcaagttttttggggtcgaggtgccgtaaagcactaaatcggaaccctaaagggagcccccgatttagagcttgacggggaaagccggcgaacgtggcgagaaaggaagggaagaaagcgaaaggagcgggcgctagggcgctggcaagtgtagcggtcacgctgcgcgtaaccaccacacccgccgcgcttaatgcgccgctacagggcgcgtcaggtg

SEQ ID NO: 3098 - DNA, 5396 bp, Artificial Sequence
  Synthetic Construct, AS-98 intein modified protein encoding nucleic acids in pBluescript
gcacttttcggggaaatgtgcgcggaacccctatttgtttatttttctaaatacattcaaatatgtatccgctcatgagacaataaccctgataaatgcttcaataatattgaaaaaggaagagtatgagtattcaacatttccgtgtcgcccttattcccttttttgcggcattttgccttcctgtttttgctcacccagaaacgctggtgaaagtaaaagatgctgaagatcagttgggtgcacgagtgggttacatcgaactggatctcaacagcggtaagatccttgagagttttcgccccgaagaacgttttccaatgatgagcacttttaaagttctgctatgtggcgcggtattatcccgtattgacgccgggcaagagcaactcggtcgccgcatacactattctcagaatgacttggttgagtactcaccagtcacagaaaagcatcttacggatggcatgacagtaagagaattatgcagtgctgccataaccatgagtgataacactgcggccaacttacttctgacaacgatcggaggaccgaaggagctaaccgcttttttgcacaacatgggggatcatgtaactcgccttgatcgttgggaaccggagctgaatgaagccataccaaacgacgagcgtgacaccacgatgcctgtagcaatggcaacaacgttgcgcaaactattaactggcgaactacttactctagcttcccggcaacaattaatagactggatggaggcggataaagttgcaggaccacttctgcgctcggcccttccggctggctggtttattgctgataaatctggagccggtgagcgtgggtctcgcggtatcattgcagcactggggccagatggtaagccctcccgtatcgtagttatctacacgacggggagtcaggcaactatggatgaacgaaatagacagatcgctgagataggtgcctcactgattaagcattggtaactgtcagaccaagtttactcatatatactttagattgatttaaaacttcatttttaatttaaaaggatctaggtgaagatcctttttgataatctcatgaccaaaatcccttaacgtgagttttcgttccactgagcgtcagaccccgtagaaaagatcaaaggatcttcttgagatcctttttttctgcgcgtaatctgctgcttgcaaacaaaaaaaccaccgctaccagcggtggtttgtttgccggatcaagagctaccaactctttttccgaaggtaactggcttcagcagagcgcagataccaaatactgtccttctagtgtagccgtagttaggccaccacttcaagaactctgtagcaccgcctacatacctcgctctgctaatcctgttaccagtggctgctgccagtggcgataagtcgtgtcttaccgggttggactcaagacgatagttaccggataaggcgcagcggtcgggctgaacggggggttcgtgcacacagcccagcttggagcgaacgacctacaccgaactgagatacctacagcgtgagctatgagaaagcgccacgcttcccgaagggagaaaggcggacaggtatccggtaagcggcagggtcggaacaggagagcgcacgagggagcttccagggggaaacgcctggtatctttatagtcctgtcgggtttcgccacctctgacttgagcgtcgatttttgtgatgctcgtcaggggggcggagcctatggaaaaacgccagcaacgcggcctttttacggttcctggccttttgctggccttttgctcacatgttctttcctgcgttatcccctgattctgtggataaccgtattaccgcctttgagtgagctgataccgctcgccgcagccgaacgaccgagcgcagcgagtcagtgagcgaggaagcggaagagcgcccaatacgcaaaccgcctctccccgcgcgttggccgattcattaatgcagctggcacgacaggtttcccgactggaaagcgggcagtgagcgcaacgcaattaatgtgagttagctcactcattaggcaccccaggctttacactttatgcttccggctcgtatgttgtgtggaattgtgagcggataacaatttcacacaggaaacagcatatgcaaacaagcattactctgacatccaacgcatccggtacgtttgacggttactattacgaactctggaaggatactggcaatacaacaatgacggtctacactcaaggtcgcttttcctgccagtggtcgaacatcaataacgcgttgtttaggaccgggaagaaatacaaccagaattggcagtctcttggcacaatccggatcacgtactctgcgacttacaacccaaacgggaactcctacttgtgtatctatggctggtctaccaacccattggtcgagttctacatcgttgagtcctgggggaactggagaccgcctggtgccacgtccctgggccaagtgacaatcgatggcgggacctacgacatctataggacgacacgcgtcaaccagcctgctctctacgatttctcggttattcagctctctaatgggcggttcgttctcatcggggatctcgtggaggagctgttcaagaagtacgccgagaagatcaagacctacaaggacctggagtacattgagctgaacgaggaggataggttcgaggtggtctcagtctccccggacctcaaggcgaataagcacgttgtgtctcgggtgtggaggaggaaggtccgcgagggggagaagctgatccgcattaagaccaggacgggcaacgagatcattctcacacgcaatcatcccctgttcgccttcagcaacggggatgtcgttaggaaggaggctgagaagctcaaagtgggcgacagggttgccgtgatgatgcggccgccctcaccacctcagactaaggcggtggtcgacccagctatctacgttaagatttccgattactacctggtgccaaacggcaaggggatgatcaaggtccctaatgacggcattccgcccgagaaggcccagtacctcctgtctgtgaactcataccccgttaagctcgtgagggaggtcgatgagaagctcagctacctggctggggtcatcctgggcgacgggtacatttccagcaatggctactacatctcggcgaccttcgacgatgaggcgtacatggacgctttcgtctccgttgtgagcgatttcatcccaaactacgtgccttccattaggaagaatggggactacacaatcgtcactgttggctctaagattttcgccgagatgctctcacggatcttcggcattccgcgcgggaggaagtccatgtgggacatccccgatgtcgttctcagcaacgacgatctgatgcgctacttcatcgccggcctcttcgacgcggatggctacgtggacgagaatggcccgagcatcgtgctggtcaccaagtcggagacggtcgccaggaagatctggtatgtgctccagcggctgggcatcatttcgacggtttctcgggtgaagtcgcgcggcttcaaggagggggagctcttccgggttatcatttctggcgtggaggatctcgctaagttcgccaagttcatcccactgaggcactcccggaagcgcgctaagctcatggagatcctgcgcacaaagaagccttacaggggcaggcgcacttacagggtcccaatctcgtctgacatgattgctccactgaggcagatgctcgggctgaccgtggctgagctctcaaagctggcctcctactacgcgggcgagaaggtcagcgagtcgctcatccgccatattgagaaggggagggtgaaggagatcaggaggtcgacgctgaagggcatcgctctcgctctgcagcagattgctaaggatgtgggcaacgaggaggcttgggtcagggctaagaggctccagctgatcgctgagggcgacgtctactgggatgaggtggtcagcgtcgaggaggttgacccgaaggagctgggcatcgagtatgtgtacgatctcacagtggaggatgatcataactacgttgctaatggcattctcgtttctaattccattgtggggacagccacgttcgatcagtactggagcgtgcgcacctctaagcggacttcaggaacagtgaccgtgaccgatcacttccgcgcctgggcgaaccggggcctgaacctcggcacaatagaccaaattacattgtgcgtggagggttaccaaagctctggatcagccaacatcacccagaacaccttctctcagggctcttcttccggcagttcgggtggctcatccggctccacaacgactactcgcatcgagtgtgagaacatgtccttgtccggaccctacgttagcaggatcaccaatccctttaatggtattgcgctgtacgccaacggagacacagcccgcgctaccgttaacttccccgcaagtcgcaactacaatttccgcctgcggggttgcggcaacaacaataatcttgcccgtgtggacctgaggatcgacggacggaccgtcgggaccttttattaccagggcacatacccctgggaggccccaattgacaatgtttatgtcagtgcggggagtcatacagtcgaaatcactgttactgcggataacggcacatgggacgtgtatgccgactacctggtgatacagtgactcgagggggggcccggtacccaattcgccctatagtgagtcgtattacaattcactggccgtcgttttacaacgtcgtgactgggaaaaccctggcgttacccaacttaatcgccttgcagcacatccccctttcgccagctggcgtaatagcgaagaggcccgcaccgatcgcccttcccaacagttgcgcagcctgaatggcgaatggaaattgtaagcgttaatattttgttaaaattcgcgttaaatttttgttaaatcagctcattttttaaccaataggccgaaatcggcaaaatcccttataaatcaaaagaatagaccgagatagggttgagtgttgttccagtttggaacaagagtccactattaaagaacgtggactccaacgtcaaagggcgaaaaaccgtctatcagggcgatggcccactacgtgaaccatcaccctaatcaagttttttggggtcgaggtgccgtaaagcactaaatcggaaccctaaagggagcccccgatttagagcttgacggggaaagccggcgaacgtggcgagaaaggaagggaagaaagcgaaaggagcgggcgctagggcgctggcaagtgtagcggtcacgctgcgcgtaaccaccacacccgccgcgcttaatgcgccgctacagggcgcgtcaggtg

SEQ ID NO: 3099 - DNA, 5033 bp, Artificial Sequence
  Synthetic Construct, AS-99 intein modified protein encoding nucleic acids in pBluescript
gcacttttcggggaaatgtgcgcggaacccctatttgtttatttttctaaatacattcaaatatgtatccgctcatgagacaataaccctgataaatgcttcaataatattgaaaaaggaagagtatgagtattcaacatttccgtgtcgcccttattcccttttttgcggcattttgccttcctgtttttgctcacccagaaacgctggtgaaagtaaaagatgctgaagatcagttgggtgcacgagtgggttacatcgaactggatctcaacagcggtaagatccttgagagttttcgccccgaagaacgttttccaatgatgagcacttttaaagttctgctatgtggcgcggtattatcccgtattgacgccgggcaagagcaactcggtcgccgcatacactattctcagaatgacttggttgagtactcaccagtcacagaaaagcatcttacggatggcatgacagtaagagaattatgcagtgctgccataaccatgagtgataacactgcggccaacttacttctgacaacgatcggaggaccgaaggagctaaccgcttttttgcacaacatgggggatcatgtaactcgccttgatcgttgggaaccggagctgaatgaagccataccaaacgacgagcgtgacaccacgatgcctgtagcaatggcaacaacgttgcgcaaactattaactggcgaactacttactctagcttcccggcaacaattaatagactggatggaggcggataaagttgcaggaccacttctgcgctcggcccttccggctggctggtttattgctgataaatctggagccggtgagcgtgggtctcgcggtatcattgcagcactggggccagatggtaagccctcccgtatcgtagttatctacacgacggggagtcaggcaactatggatgaacgaaatagacagatcgctgagataggtgcctcactgattaagcattggtaactgtcagaccaagtttactcatatatactttagattgatttaaaacttcatttttaatttaaaaggatctaggtgaagatcctttttgataatctcatgaccaaaatcccttaacgtgagttttcgttccactgagcgtcagaccccgtagaaaagatcaaaggatcttcttgagatcctttttttctgcgcgtaatctgctgcttgcaaacaaaaaaaccaccgctaccagcggtggtttgtttgccggatcaagagctaccaactctttttccgaaggtaactggcttcagcagagcgcagataccaaatactgtccttctagtgtagccgtagttaggccaccacttcaagaactctgtagcaccgcctacatacctcgctctgctaatcctgttaccagtggctgctgccagtggcgataagtcgtgtcttaccgggttggactcaagacgatagttaccggataaggcgcagcggtcgggctgaacggggggttcgtgcacacagcccagcttggagcgaacgacctacaccgaactgagatacctacagcgtgagctatgagaaagcgccacgcttcccgaagggagaaaggcggacaggtatccggtaagcggcagggtcggaacaggagagcgcacgagggagcttccagggggaaacgcctggtatctttatagtcctgtcgggtttcgccacctctgacttgagcgtcgatttttgtgatgctcgtcaggggggcggagcctatggaaaaacgccagcaacgcggcctttttacggttcctggccttttgctggccttttgctcacatgttctttcctgcgttatcccctgattctgtggataaccgtattaccgcctttgagtgagctgataccgctcgccgcagccgaacgaccgagcgcagcgagtcagtgagcgaggaagcggaagagcgcccaatacgcaaaccgcctctccccgcgcgttggccgattcattaatgcagctggcacgacaggtttcccgactggaaagcgggcagtgagcgcaacgcaattaatgtgagttagctcactcattaggcaccccaggctttacactttatgcttccggctcgtatgttgtgtggaattgtgagcggataacaatttcacacaggaaacagcatatgcaaacaagcattactctgacatccaacgcatccggtacgtttgacggttactattacgaactctggaaggatactggcaatacaacaatgacggtctacactcaaggtcgcttttcctgccagtggtcgaacatcaataacgcgttgtttaggaccgggaagaaatacaaccagaattggcagtctcttggcacaatccggatcacgtactctgcgacttacaacccaaacgggaactcctacttgtgtatctatggctggtctaccaacccattggtcgagttctacatcgttgagtcctgggggaactggagaccgcctggtgccacgtccctgggccaagtgacaatcgatggcgggacctacgacatctataggacgacacgcgtcaaccagccttgcttctcgggggaggaggttattctcattgagaaggacggggagaagaaggttttcaagctgcgggagttcgtggacgggctgctgaaggaggcttctggcgaggggatggacggctcaatccgggtggtctacaaggatctccagggcgagaacatcaagattctcaccaaggatgggctggtgaagctcctctacgtgaaccgcagggaggggaagcagaagctcaggaagatcgttaatctggagaaggactactggctcgccctgaccccggagcacaaggtctacacgatcaagggcctgaaggaggcgggggagattaccaaggacgatgagatcattcgcgtcccgctcacgatcctggacggcttcgatgttgcggagaagtccattagggaggagctggagaggctgagcctcctgcccctcaactcagaggattccaggctggagaagatcgcgggcattatgggggctctcttcggctcgggcgggatcgacgagaacctcaatacactgtctttcgtgtccagcgagaagaagactatcgagcagttcgtcaaggctctcagcgagctgttcggcgagttcgactacaagatcgaggagaaggagaactccatcatcttccgcacctgcgataagcggatcgtgacattcttcgctactctgggcgccccagttggggacaagtcaaaggtgaagctcaagctgccatggtgggtcaagctcaagccttccctcttcctggccttcatggacggcctgtactcgtctaaccgcaatgataaggagatcctggagattacccagctgacggacaacgtggagacattcttcgaggagatcagctggtacctctcgttcttcggcattaaggccgaggcggaggaggacgaggagaaggataagtacagggctcggctcactctgtcatccagcatcgacaacatgctgaatttcattgagttcatcccgatttcgttctctcccgccaagagggagaagttcttcaaggagatcgagaagtacctggagtactccattcccgagaagacggaggacctgaagaagcgcgtcaagagggttaagaagggcgagcggcgcaacttcctggagtcctgggaggaggttgaggtgacctacaatgttactacggagacaggcaatctgctcgctaatgggctcttcgttaagaactccattgtggggacagccacgttcgatcagtactggagcgtgcgcacctctaagcggacttcaggaacagtgaccgtgaccgatcacttccgcgcctgggcgaaccggggcctgaacctcggcacaatagaccaaattacattgtgcgtggagggttaccaaagctctggatcagccaacatcacccagaacaccttctctcagggctcttcttccggcagttcgggtggctcatccggctccacaacgactactcgcatcgagtgtgagaacatgtccttgtccggaccctacgttagcaggatcaccaatccctttaatggtattgcgctgtacgccaacggagacacagcccgcgctaccgttaacttccccgcaagtcgcaactacaatttccgcctgcggggttgcggcaacaacaataatcttgcccgtgtggacctgaggatcgacggacggaccgtcgggaccttttattaccagggcacatacccctgggaggccccaattgacaatgtttatgtcagtgcggggagtcatacagtcgaaatcactgttactgcggataacggcacatgggacgtgtatgccgactacctggtgatacagtgactcgagggggggcccggtacccaattcgccctatagtgagtcgtattacaattcactggccgtcgttttacaacgtcgtgactgggaaaaccctggcgttacccaacttaatcgccttgcagcacatccccctttcgccagctggcgtaatagcgaagaggcccgcaccgatcgcccttcccaacagttgcgcagcctgaatggcgaatggaaattgtaagcgttaatattttgttaaaattcgcgttaaatttttgttaaatcagctcattttttaaccaataggccgaaatcggcaaaatcccttataaatcaaaagaatagaccgagatagggttgagtgttgttccagtttggaacaagagtccactattaaagaacgtggactccaacgtcaaagggcgaaaaaccgtctatcagggcgatggcccactacgtgaaccatcaccctaatcaagttttttggggtcgaggtgccgtaaagcactaaatcggaaccctaaagggagcccccgatttagagcttgacggggaaagccggcgaacgtggcgagaaaggaagggaagaaagcgaaaggagcgggcgctagggcgctggcaagtgtagcggtcacgctgcgcgtaaccaccacacccgccgcgcttaatgcgccgctacagggcgcgtcaggtg

SEQ ID NO: 3100 - DNA, 5405 bp, Artificial Sequence
  Synthetic Construct, AS-100 intein modified protein encoding nucleic acids in pBluescript
gcacttttcggggaaatgtgcgcggaacccctatttgtttatttttctaaatacattcaaatatgtatccgctcatgagacaataaccctgataaatgcttcaataatattgaaaaaggaagagtatgagtattcaacatttccgtgtcgcccttattcccttttttgcggcattttgccttcctgtttttgctcacccagaaacgctggtgaaagtaaaagatgctgaagatcagttgggtgcacgagtgggttacatcgaactggatctcaacagcggtaagatccttgagagttttcgccccgaagaacgttttccaatgatgagcacttttaaagttctgctatgtggcgcggtattatcccgtattgacgccgggcaagagcaactcggtcgccgcatacactattctcagaatgacttggttgagtactcaccagtcacagaaaagcatcttacggatggcatgacagtaagagaattatgcagtgctgccataaccatgagtgataacactgcggccaacttacttctgacaacgatcggaggaccgaaggagctaaccgcttttttgcacaacatgggggatcatgtaactcgccttgatcgttgggaaccggagctgaatgaagccataccaaacgacgagcgtgacaccacgatgcctgtagcaatggcaacaacgttgcgcaaactattaactggcgaactacttactctagcttcccggcaacaattaatagactggatggaggcggataaagttgcaggaccacttctgcgctcggcccttccggctggctggtttattgctgataaatctggagccggtgagcgtgggtctcgcggtatcattgcagcactggggccagatggtaagccctcccgtatcgtagttatctacacgacggggagtcaggcaactatggatgaacgaaatagacagatcgctgagataggtgcctcactgattaagcattggtaactgtcagaccaagtttactcatatatactttagattgatttaaaacttcatttttaatttaaaaggatctaggtgaagatcctttttgataatctcatgaccaaaatcccttaacgtgagttttcgttccactgagcgtcagaccccgtagaaaagatcaaaggatcttcttgagatcctttttttctgcgcgtaatctgctgcttgcaaacaaaaaaaccaccgctaccagcggtggtttgtttgccggatcaagagctaccaactctttttccgaaggtaactggcttcagcagagcgcagataccaaatactgtccttctagtgtagccgtagttaggccaccacttcaagaactctgtagcaccgcctacatacctcgctctgctaatcctgttaccagtggctgctgccagtggcgataagtcgtgtcttaccgggttggactcaagacgatagttaccggataaggcgcagcggtcgggctgaacggggggttcgtgcacacagcccagcttggagcgaacgacctacaccgaactgagatacctacagcgtgagctatgagaaagcgccacgcttcccgaagggagaaaggcggacaggtatccggtaagcggcagggtcggaacaggagagcgcacgagggagcttccagggggaaacgcctggtatctttatagtcctgtcgggtttcgccacctctgacttgagcgtcgatttttgtgatgctcgtcaggggggcggagcctatggaaaaacgccagcaacgcggcctttttacggttcctggccttttgctggccttttgctcacatgttctttcctgcgttatcccctgattctgtggataaccgtattaccgcctttgagtgagctgataccgctcgccgcagccgaacgaccgagcgcagcgagtcagtgagcgaggaagcggaagagcgcccaatacgcaaaccgcctctccccgcgcgttggccgattcattaatgcagctggcacgacaggtttcccgactggaaagcgggcagtgagcgcaacgcaattaatgtgagttagctcactcattaggcaccccaggctttacactttatgcttccggctcgtatgttgtgtggaattgtgagcggataacaatttcacacaggaaacagcatatgcaaacaagcattactctgacatccaacgcatccggtacgtttgacggttactattacgaactctggaaggatactggcaatacaacaatgacggtctacactcaaggtcgcttttcctgccagtggtcgaacatcaataacgcgttgtttaggaccgggaagaaatacaaccagaattggcagtctcttggcacaatccggatcacgtactctgcgacttacaacccaaacgggaactcctacttgtgtatctatggctggtctaccaacccattggtcgagttctacatcgttgagtcctgggggaactggagaccgcctggtgccacgtccctgggccaagtgacaatcgatggcgggacctacgacatctataggacgacacgcgtcaaccagccttgcctcacaggggacactaaggttatcgctaatgggcagctgttcgagctgggggagctggtggagaagctctcgggcgggcggttcggcccaacgccagtgaagggcctcaaggtcctggggatcgacgaggatggcaagctccgcgagttcgaggttcagtatgtgtacaaggaccgcaccgataggctgatcaagattaagacgcagctgggccgggagctcaaggtgacaccataccaccctctcctggtcaaccgcgagaatggcgagatcaagtggattaaggccgaggagctgaagccaggggacaagctcgcgatcccgtcgttcctccccctgattaccggcgagaaccctctggctgagtggctggggtacttcatgggctctgggtacgcttacccatcgaactctgtgatcaccttcacgaatgaggaccctctcatccgccagaggttcatggagctgaccgagaagctcttcccggacgcgaagatccgggagcgcattcatgctgatggcacgcccgaggtctacgtggtctccaggaaggcttggagcctcgttaactcaatctccctcaccctgattccacgggagggctggaaggggatccggtcgttcctgcgcgcctactctgactgcaatggccggatcgagtcagatgctattgtgctctccacggacaacaatgatatggcccagcagatcgcctacgcgctggcttcgttcgggatcattgcgaagatggacggcgaggatgtcatcattagcgggtcggacaacatcgagaggttcctcaatgagattggcttctctacacagtcaaagctgaaggaggcccagaagctcatcaggaagactaacgtgcggtctgacggcctgaagatcaattacgagctcatttcatacgttaaggacaggctccggctgaacgtgaatgataagcgcaacctgagctacaggaatgcgaaggagctgtcgtgggagctcatgaaggagatctactaccggctggaggagctggagcgcctcaagaaggtcctgtccgagccgatcctcattgactggaacgaggtcgccaagaagagcgatgaggttatcgagaaggccaagattcgcgcggagaagctcctggagtacatcaagggcgagaggaagccctccttcaaggagtacatcgagattgccaaggttctggggatcaacgtggagaggacaatcgaggctatgaagattttcgccaagaggtactccagctacgcggagatcggccggaagctggggacttggaacttcaatgtgaagacaatcctggagtccgacactgtcgataacgttgagatcctggagaagatccgcaagattgagctggagctgatcgaggagattctgagcgacgggaagctcaaggagggcatcgcgtacctgattttcctcttccagaacgagctctactgggatgagatcaccgaggtcaaggagctgaggggcgacttcatcatctacgatctgcacgttccaggctaccacaacttcattgcgggcaacatgccaacagtcgttcataactccattgtggggacagccacgttcgatcagtactggagcgtgcgcacctctaagcggacttcaggaacagtgaccgtgaccgatcacttccgcgcctgggcgaaccggggcctgaacctcggcacaatagaccaaattacattgtgcgtggagggttaccaaagctctggatcagccaacatcacccagaacaccttctctcagggctcttcttccggcagttcgggtggctcatccggctccacaacgactactcgcatcgagtgtgagaacatgtccttgtccggaccctacgttagcaggatcaccaatccctttaatggtattgcgctgtacgccaacggagacacagcccgcgctaccgttaacttccccgcaagtcgcaactacaatttccgcctgcggggttgcggcaacaacaataatcttgcccgtgtggacctgaggatcgacggacggaccgtcgggaccttttattaccagggcacatacccctgggaggccccaattgacaatgtttatgtcagtgcggggagtcatacagtcgaaatcactgttactgcggataacggcacatgggacgtgtatgccgactacctggtgatacagtgactcgagggggggcccggtacccaattcgccctatagtgagtcgtattacaattcactggccgtcgttttacaacgtcgtgactgggaaaaccctggcgttacccaacttaatcgccttgcagcacatccccctttcgccagctggcgtaatagcgaagaggcccgcaccgatcgcccttcccaacagttgcgcagcctgaatggcgaatggaaattgtaagcgttaatattttgttaaaattcgcgttaaatttttgttaaatcagctcattttttaaccaataggccgaaatcggcaaaatcccttataaatcaaaagaatagaccgagatagggttgagtgttgttccagtttggaacaagagtccactattaaagaacgtggactccaacgtcaaagggcgaaaaaccgtctatcagggcgatggcccactacgtgaaccatcaccctaatcaagttttttggggtcgaggtgccgtaaagcactaaatcggaaccctaaagggagcccccgatttagagcttgacggggaaagccggcgaacgtggcgagaaaggaagggaagaaagcgaaaggagcgggcgctagggcgctggcaagtgtagcggtcacgctgcgcgtaaccaccacacccgccgcgcttaatgcgccgctacagggcgcgtcaggtg

SEQ ID NO: 3101 - DNA, 4949 bp, Artificial Sequence
  Synthetic Construct, AS-101 intein modified protein encoding nucleic acids in pBluescript
gcacttttcggggaaatgtgcgcggaacccctatttgtttatttttctaaatacattcaaatatgtatccgctcatgagacaataaccctgataaatgcttcaataatattgaaaaaggaagagtatgagtattcaacatttccgtgtcgcccttattcccttttttgcggcattttgccttcctgtttttgctcacccagaaacgctggtgaaagtaaaagatgctgaagatcagttgggtgcacgagtgggttacatcgaactggatctcaacagcggtaagatccttgagagttttcgccccgaagaacgttttccaatgatgagcacttttaaagttctgctatgtggcgcggtattatcccgtattgacgccgggcaagagcaactcggtcgccgcatacactattctcagaatgacttggttgagtactcaccagtcacagaaaagcatcttacggatggcatgacagtaagagaattatgcagtgctgccataaccatgagtgataacactgcggccaacttacttctgacaacgatcggaggaccgaaggagctaaccgcttttttgcacaacatgggggatcatgtaactcgccttgatcgttgggaaccggagctgaatgaagccataccaaacgacgagcgtgacaccacgatgcctgtagcaatggcaacaacgttgcgcaaactattaactggcgaactacttactctagcttcccggcaacaattaatagactggatggaggcggataaagttgcaggaccacttctgcgctcggcccttccggctggctggtttattgctgataaatctggagccggtgagcgtgggtctcgcggtatcattgcagcactggggccagatggtaagccctcccgtatcgtagttatctacacgacggggagtcaggcaactatggatgaacgaaatagacagatcgctgagataggtgcctcactgattaagcattggtaactgtcagaccaagtttactcatatatactttagattgatttaaaacttcatttttaatttaaaaggatctaggtgaagatcctttttgataatctcatgaccaaaatcccttaacgtgagttttcgttccactgagcgtcagaccccgtagaaaagatcaaaggatcttcttgagatcctttttttctgcgcgtaatctgctgcttgcaaacaaaaaaaccaccgctaccagcggtggtttgtttgccggatcaagagctaccaactctttttccgaaggtaactggcttcagcagagcgcagataccaaatactgtccttctagtgtagccgtagttaggccaccacttcaagaactctgtagcaccgcctacatacctcgctctgctaatcctgttaccagtggctgctgccagtggcgataagtcgtgtcttaccgggttggactcaagacgatagttaccggataaggcgcagcggtcgggctgaacggggggttcgtgcacacagcccagcttggagcgaacgacctacaccgaactgagatacctacagcgtgagctatgagaaagcgccacgcttcccgaagggagaaaggcggacaggtatccggtaagcggcagggtcggaacaggagagcgcacgagggagcttccagggggaaacgcctggtatctttatagtcctgtcgggtttcgccacctctgacttgagcgtcgatttttgtgatgctcgtcaggggggcggagcctatggaaaaacgccagcaacgcggcctttttacggttcctggccttttgctggccttttgctcacatgttctttcctgcgttatcccctgattctgtggataaccgtattaccgcctttgagtgagctgataccgctcgccgcagccgaacgaccgagcgcagcgagtcagtgagcgaggaagcggaagagcgcccaatacgcaaaccgcctctccccgcgcgttggccgattcattaatgcagctggcacgacaggtttcccgactggaaagcgggcagtgagcgcaacgcaattaatgtgagttagctcactcattaggcaccccaggctttacactttatgcttccggctcgtatgttgtgtggaattgtgagcggataacaatttcacacaggaaacagcatatgcaaacaagcattactctgacatccaacgcatccggtacgtttgacggttactattacgaactctggaaggatactggcaatacaacaatgacggtctacactcaaggtcgcttttcctgccagtggtcgaacatcaataacgcgttgtttaggaccgggaagaaatacaaccagaattggcagtctcttggcacaatccggatcacgtactctgcgacttacaacccaaacgggaactcctacttgtgtatctatggctggtctaccaacccattggtcgagttctacatcgttgagtcctgggggaactggagaccgcctggtgccacgtccctgggccaagtgacaatcgatggcgggacctacgacatctataggacgacacgcgtcaaccagccttgcctgcatcctgacactctcattctcacatcacagggggttcgcaagatcaaggagctctcgcgggagggggaggttttcgctctcgacttcaacctgaagctctccaaggcgaagtacaggctcctggagcgggacgctgatgagcagatgtacaaggtgaccctcctggacggcacggagctgtacctcacagccgatcacccagtgctcgtctacagggagggcaatctggctttcgttcctgccgacaagctccgggagacggatcatgtggtcctggtgctcaacaagtctgctcgggacaattacggcttcctcgatctcctgctggagattactgactcacaggaggattacgccatcctggagaacggcgagaccctgtcgctccactctctgaagatgctcgtggagcgcggggagatcaaggacattgcggttgtgggcttctcgcataacaatttcgggaaggtcatgctcagggatgagctgtggtacctcatcggctacctggctgggaagggcggggagatcaagggcaacggggtcgttatttccagcaggacgaaggagatcgtcggcctgacaaagagcctcaacatcgacctgattgagaccgaggaggggatcgtgctctcaaataagtccttcgtccggctgctccacctgatccattacacgccgcgcgtccccgaggtttacggcatcattaacaatacagagtggctcaaggccttcctggcgggctactacgacgccactctgctggaggggctgaccctggaggctctctacaagatcaaggtctacctgcagctgctcggcatccgcgcgaagattgaggacaacaagctcaaggttcacctggaggatctccagcggttccgcgagctgctcggcaagttcagccgccgcaagctctacgtggagacttcgcaggttccggtgttcaccgacttcgatgagcgctcctacgacttcccaaggatcctgggcggggatatctacatcattggcatcaagagcattgagaagttccattacaaggggaaggtctacgatctcgtcgtggagaactaccacaacttcattgctaatggcattgctgtgcataattccattgtggggacagccacgttcgatcagtactggagcgtgcgcacctctaagcggacttcaggaacagtgaccgtgaccgatcacttccgcgcctgggcgaaccggggcctgaacctcggcacaatagaccaaattacattgtgcgtggagggttaccaaagctctggatcagccaacatcacccagaacaccttctctcagggctcttcttccggcagttcgggtggctcatccggctccacaacgactactcgcatcgagtgtgagaacatgtccttgtccggaccctacgttagcaggatcaccaatccctttaatggtattgcgctgtacgccaacggagacacagcccgcgctaccgttaacttccccgcaagtcgcaactacaatttccgcctgcggggttgcggcaacaacaataatcttgcccgtgtggacctgaggatcgacggacggaccgtcgggaccttttattaccagggcacatacccctgggaggccccaattgacaatgtttatgtcagtgcggggagtcatacagtcgaaatcactgttactgcggataacggcacatgggacgtgtatgccgactacctggtgatacagtgactcgagggggggcccggtacccaattcgccctatagtgagtcgtattacaattcactggccgtcgttttacaacgtcgtgactgggaaaaccctggcgttacccaacttaatcgccttgcagcacatccccctttcgccagctggcgtaatagcgaagaggcccgcaccgatcgcccttcccaacagttgcgcagcctgaatggcgaatggaaattgtaagcgttaatattttgttaaaattcgcgttaaatttttgttaaatcagctcattttttaaccaataggccgaaatcggcaaaatcccttataaatcaaaagaatagaccgagatagggttgagtgttgttccagtttggaacaagagtccactattaaagaacgtggactccaacgtcaaagggcgaaaaaccgtctatcagggcgatggcccactacgtgaaccatcaccctaatcaagttttttggggtcgaggtgccgtaaagcactaaatcggaaccctaaagggagcccccgatttagagcttgacggggaaagccggcgaacgtggcgagaaaggaagggaagaaagcgaaaggagcgggcgctagggcgctggcaagtgtagcggtcacgctgcgcgtaaccaccacacccgccgcgcttaatgcgccgctacagggcgcgtcaggtg

SEQ ID NO: 3102 - DNA, 4610 bp, Artificial Sequence
  Synthetic Construct, AS-102 intein modified protein encoding nucleic acids in pBluescript
gcacttttcggggaaatgtgcgcggaacccctatttgtttatttttctaaatacattcaaatatgtatccgctcatgagacaataaccctgataaatgcttcaataatattgaaaaaggaagagtatgagtattcaacatttccgtgtcgcccttattcccttttttgcggcattttgccttcctgtttttgctcacccagaaacgctggtgaaagtaaaagatgctgaagatcagttgggtgcacgagtgggttacatcgaactggatctcaacagcggtaagatccttgagagttttcgccccgaagaacgttttccaatgatgagcacttttaaagttctgctatgtggcgcggtattatcccgtattgacgccgggcaagagcaactcggtcgccgcatacactattctcagaatgacttggttgagtactcaccagtcacagaaaagcatcttacggatggcatgacagtaagagaattatgcagtgctgccataaccatgagtgataacactgcggccaacttacttctgacaacgatcggaggaccgaaggagctaaccgcttttttgcacaacatgggggatcatgtaactcgccttgatcgttgggaaccggagctgaatgaagccataccaaacgacgagcgtgacaccacgatgcctgtagcaatggcaacaacgttgcgcaaactattaactggcgaactacttactctagcttcccggcaacaattaatagactggatggaggcggataaagttgcaggaccacttctgcgctcggcccttccggctggctggtttattgctgataaatctggagccggtgagcgtgggtctcgcggtatcattgcagcactggggccagatggtaagccctcccgtatcgtagttatctacacgacggggagtcaggcaactatggatgaacgaaatagacagatcgctgagataggtgcctcactgattaagcattggtaactgtcagaccaagtttactcatatatactttagattgatttaaaacttcatttttaatttaaaaggatctaggtgaagatcctttttgataatctcatgaccaaaatcccttaacgtgagttttcgttccactgagcgtcagaccccgtagaaaagatcaaaggatcttcttgagatcctttttttctgcgcgtaatctgctgcttgcaaacaaaaaaaccaccgctaccagcggtggtttgtttgccggatcaagagctaccaactctttttccgaaggtaactggcttcagcagagcgcagataccaaatactgtccttctagtgtagccgtagttaggccaccacttcaagaactctgtagcaccgcctacatacctcgctctgctaatcctgttaccagtggctgctgccagtggcgataagtcgtgtcttaccgggttggactcaagacgatagttaccggataaggcgcagcggtcgggctgaacggggggttcgtgcacacagcccagcttggagcgaacgacctacaccgaactgagatacctacagcgtgagctatgagaaagcgccacgcttcccgaagggagaaaggcggacaggtatccggtaagcggcagggtcggaacaggagagcgcacgagggagcttccagggggaaacgcctggtatctttatagtcctgtcgggtttcgccacctctgacttgagcgtcgatttttgtgatgctcgtcaggggggcggagcctatggaaaaacgccagcaacgcggcctttttacggttcctggccttttgctggccttttgctcacatgttctttcctgcgttatcccctgattctgtggataaccgtattaccgcctttgagtgagctgataccgctcgccgcagccgaacgaccgagcgcagcgagtcagtgagcgaggaagcggaagagcgcccaatacgcaaaccgcctctccccgcgcgttggccgattcattaatgcagctggcacgacaggtttcccgactggaaagcgggcagtgagcgcaacgcaattaatgtgagttagctcactcattaggcaccccaggctttacactttatgcttccggctcgtatgttgtgtggaattgtgagcggataacaatttcacacaggaaacagcatatgcaaacaagcattactctgacatccaacgcatccggtacgtttgacggttactattacgaactctggaaggatactggcaatacaacaatgacggtctacactcaaggtcgcttttcctgccagtggtcgaacatcaataacgcgttgtttaggaccgggaagaaatacaaccagaattggcagtctcttggcacaatccggatcacgtactctgcgacttacaacccaaacgggaactcctacttgtgtatctatggctggtctaccaacccattggtcgagttctacatcgttgagtcctgggggaactggagaccgcctggtgccacgtccctgggccaagtgacaatcgatggcgggacctacgacatctataggacgacacgcgtcaaccagccttgcgtcgcgcctgatactctcattaacacagacaacgggcgggtggagatcggcaagttcgtggaggagtggatgaaggaggtcggggagatttcggaggagggcatctcttacgccccgtgcttccgcaaggtcgagaccttcaaggacgggaagattgttgagagcccaatccgcagggtgtggaagctccgggctcctaagaagctggtgcgcattaagacagagaacggccgcagcatcgccctcacaagggagactaagctcctgactatcaatgatggcgagctgtcgtgggtcgaggctggggaggtgaaggtcggcacctacgttgggacggtgaagtcagagaaggacgtgattccaggcgctgggaagaccatcagggatgtctccaagctctacaacatggagatggaggtcaaggactacctgacgagggaggaggttcggaaggcgattgagaagctggaggagatcatgaacccgatgaatatcaagattcccggcgtgcaggagtcctacgaggagctcctgcggaagctggagaccacgaacgatgagcgggttcgcaatgagacactcatcctcctgtccgacgtgagcgatgcccacgagctggcgaaggagaagatcgagaagattaaggagatcgtgaactccgaggtccattgggagaaggtcaccgaggttggcgaggtggacggggtcgagtatgtgtacgatctcacagtggagggctctcataatttcgttgctaatggcttcatcgttcataattccattgtggggacagccacgttcgatcagtactggagcgtgcgcacctctaagcggacttcaggaacagtgaccgtgaccgatcacttccgcgcctgggcgaaccggggcctgaacctcggcacaatagaccaaattacattgtgcgtggagggttaccaaagctctggatcagccaacatcacccagaacaccttctctcagggctcttcttccggcagttcgggtggctcatccggctccacaacgactactcgcatcgagtgtgagaacatgtccttgtccggaccctacgttagcaggatcaccaatccctttaatggtattgcgctgtacgccaacggagacacagcccgcgctaccgttaacttccccgcaagtcgcaactacaatttccgcctgcggggttgcggcaacaacaataatcttgcccgtgtggacctgaggatcgacggacggaccgtcgggaccttttattaccagggcacatacccctgggaggccccaattgacaatgtttatgtcagtgcggggagtcatacagtcgaaatcactgttactgcggataacggcacatgggacgtgtatgccgactacctggtgatacagtgactcgagggggggcccggtacccaattcgccctatagtgagtcgtattacaattcactggccgtcgttttacaacgtcgtgactgggaaaaccctggcgttacccaacttaatcgccttgcagcacatccccctttcgccagctggcgtaatagcgaagaggcccgcaccgatcgcccttcccaacagttgcgcagcctgaatggcgaatggaaattgtaagcgttaatattttgttaaaattcgcgttaaatttttgttaaatcagctcattttttaaccaataggccgaaatcggcaaaatcccttataaatcaaaagaatagaccgagatagggttgagtgttgttccagtttggaacaagagtccactattaaagaacgtggactccaacgtcaaagggcgaaaaaccgtctatcagggcgatggcccactacgtgaaccatcaccctaatcaagttttttggggtcgaggtgccgtaaagcactaaatcggaaccctaaagggagcccccgatttagagcttgacggggaaagccggcgaacgtggcgagaaaggaagggaagaaagcgaaaggagcgggcgctagggcgctggcaagtgtagcggtcacgctgcgcgtaaccaccacacccgccgcgcttaatgcgccgctacagggcgcgtcaggtg

SEQ ID NO: 3103 - DNA, 5162 bp, Artificial Sequence
  Synthetic Construct, AS-103 intein modified protein encoding nucleic acids in pBluescript
gcacttttcggggaaatgtgcgcggaacccctatttgtttatttttctaaatacattcaaatatgtatccgctcatgagacaataaccctgataaatgcttcaataatattgaaaaaggaagagtatgagtattcaacatttccgtgtcgcccttattcccttttttgcggcattttgccttcctgtttttgctcacccagaaacgctggtgaaagtaaaagatgctgaagatcagttgggtgcacgagtgggttacatcgaactggatctcaacagcggtaagatccttgagagttttcgccccgaagaacgttttccaatgatgagcacttttaaagttctgctatgtggcgcggtattatcccgtattgacgccgggcaagagcaactcggtcgccgcatacactattctcagaatgacttggttgagtactcaccagtcacagaaaagcatcttacggatggcatgacagtaagagaattatgcagtgctgccataaccatgagtgataacactgcggccaacttacttctgacaacgatcggaggaccgaaggagctaaccgcttttttgcacaacatgggggatcatgtaactcgccttgatcgttgggaaccggagctgaatgaagccataccaaacgacgagcgtgacaccacgatgcctgtagcaatggcaacaacgttgcgcaaactattaactggcgaactacttactctagcttcccggcaacaattaatagactggatggaggcggataaagttgcaggaccacttctgcgctcggcccttccggctggctggtttattgctgataaatctggagccggtgagcgtgggtctcgcggtatcattgcagcactggggccagatggtaagccctcccgtatcgtagttatctacacgacggggagtcaggcaactatggatgaacgaaatagacagatcgctgagataggtgcctcactgattaagcattggtaactgtcagaccaagtttactcatatatactttagattgatttaaaacttcatttttaatttaaaaggatctaggtgaagatcctttttgataatctcatgaccaaaatcccttaacgtgagttttcgttccactgagcgtcagaccccgtagaaaagatcaaaggatcttcttgagatcctttttttctgcgcgtaatctgctgcttgcaaacaaaaaaaccaccgctaccagcggtggtttgtttgccggatcaagagctaccaactctttttccgaaggtaactggcttcagcagagcgcagataccaaatactgtccttctagtgtagccgtagttaggccaccacttcaagaactctgtagcaccgcctacatacctcgctctgctaatcctgttaccagtggctgctgccagtggcgataagtcgtgtcttaccgggttggactcaagacgatagttaccggataaggcgcagcggtcgggctgaacggggggttcgtgcacacagcccagcttggagcgaacgacctacaccgaactgagatacctacagcgtgagctatgagaaagcgccacgcttcccgaagggagaaaggcggacaggtatccggtaagcggcagggtcggaacaggagagcgcacgagggagcttccagggggaaacgcctggtatctttatagtcctgtcgggtttcgccacctctgacttgagcgtcgatttttgtgatgctcgtcaggggggcggagcctatggaaaaacgccagcaacgcggcctttttacggttcctggccttttgctggccttttgctcacatgttctttcctgcgttatcccctgattctgtggataaccgtattaccgcctttgagtgagctgataccgctcgccgcagccgaacgaccgagcgcagcgagtcagtgagcgaggaagcggaagagcgcccaatacgcaaaccgcctctccccgcgcgttggccgattcattaatgcagctggcacgacaggtttcccgactggaaagcgggcagtgagcgcaacgcaattaatgtgagttagctcactcattaggcaccccaggctttacactttatgcttccggctcgtatgttgtgtggaattgtgagcggataacaatttcacacaggaaacagcatatgcaaacaagcattactctgacatccaacgcatccggtacgtttgacggttactattacgaactctggaaggatactggcaatacaacaatgacggtctacactcaaggtcgcttttcctgccagtggtcgaacatcaataacgcgttgtttaggaccgggaagaaatacaaccagaattggcagtctcttggcacaatccggatcacgtactctgcgacttacaacccaaacgggaactcctacttgtgtatctatggctggtctaccaacccattggtcgagttctacatcgttgagtcctgggggaactggagaccgcctggtgccacgtccctgggccaagtgacaatcgatggcgggacctacgacatctataggacgacacgcgtcaaccagccttgcctgctgccggaggagcgggttattctgcctgactacgggcctattactctggaggagctcttcaatatgacaaaggagacagtgttcaaggacgaggagaaggaggtccggaagctcggcatccgcatgccagtggctggcgtcgatgggcgggtgcgcctgctggagggcccctacgtttggaaggtgcgctacaaggggaagatgctcagggtcaagctgaaggactggcacagcgtggctgtcacaccagagcatcccttcctcaccacgcggggctgggtgcgcgctgaccagctgaagcccggggattacgttgccgtgccaaagatcctccctgggaaggacgataaggagaagttcctccagtatgtgcacgagaagctgaagggcaaggttcatattaagctgccgtccagcgacgaggagtgggagacattcttctacttcgccggcactatcttcgggcgcgagaactcggtgaatccagagggcctcacccacgaggtcaaggctctcctggagctcttcaaggttctgttcgagtacccgagggaggtcctccgggttctgttcatggccccggtgcgctacgtggcgaacttcctccgcggcttcttcgacattaacggctacgtcaatggggaggagctgagggtcgaggttaggggggctccacatgaggttctggaggagctctccctgatcctcctgaggctgggcatcgtgtccaagatctaccctacgagcctggctatttcgggcaggaggaacctggagctgttccggcgctacatcgggttctcggagaagcagaaggccaaggagctggagggcatcattaggcggtctgagaactcagagtcctacccaattttcgaggagctgcgcaggatcaggctcctgttcggcttcacccgggcggagctctcgtctacgatcccactgtactctaagtacgagtcaaaggaggctccttcatacgagatcctcatgaagattctgaatacaatcgagaaggggtctaaggacctcaacaagaagatcactattctggagggcagggtgcgggatcacgagtacattgaggagttcaagcgcgagggcctgatcaaggacgggaagctcaccgagctgggcaaggagctcctggaggtctggcgcaacagggagttcgactccagggatgtcaactacctccggaatatcattgagaacttcgttttcctgccggtggagaagatcgaggagttcgagtacgatggctacgtctacgacgttactacagagactcataatttcattgctaatggcatcctcgttcataattccattgtggggacagccacgttcgatcagtactggagcgtgcgcacctctaagcggacttcaggaacagtgaccgtgaccgatcacttccgcgcctgggcgaaccggggcctgaacctcggcacaatagaccaaattacattgtgcgtggagggttaccaaagctctggatcagccaacatcacccagaacaccttctctcagggctcttcttccggcagttcgggtggctcatccggctccacaacgactactcgcatcgagtgtgagaacatgtccttgtccggaccctacgttagcaggatcaccaatccctttaatggtattgcgctgtacgccaacggagacacagcccgcgctaccgttaacttccccgcaagtcgcaactacaatttccgcctgcggggttgcggcaacaacaataatcttgcccgtgtggacctgaggatcgacggacggaccgtcgggaccttttattaccagggcacatacccctgggaggccccaattgacaatgtttatgtcagtgcggggagtcatacagtcgaaatcactgttactgcggataacggcacatgggacgtgtatgccgactacctggtgatacagtgactcgagggggggcccggtacccaattcgccctatagtgagtcgtattacaattcactggccgtcgttttacaacgtcgtgactgggaaaaccctggcgttacccaacttaatcgccttgcagcacatccccctttcgccagctggcgtaatagcgaagaggcccgcaccgatcgcccttcccaacagttgcgcagcctgaatggcgaatggaaattgtaagcgttaatattttgttaaaattcgcgttaaatttttgttaaatcagctcattttttaaccaataggccgaaatcggcaaaatcccttataaatcaaaagaatagaccgagatagggttgagtgttgttccagtttggaacaagagtccactattaaagaacgtggactccaacgtcaaagggcgaaaaaccgtctatcagggcgatggcccactacgtgaaccatcaccctaatcaagttttttggggtcgaggtgccgtaaagcactaaatcggaaccctaaagggagcccccgatttagagcttgacggggaaagccggcgaacgtggcgagaaaggaagggaagaaagcgaaaggagcgggcgctagggcgctggcaagtgtagcggtcacgctgcgcgtaaccaccacacccgccgcgcttaatgcgccgctacagggcgcgtcaggtg

SEQ ID NO: 3104 - DNA, 5255 bp, Artificial Sequence
  Synthetic Construct, AS-104 intein modified protein encoding nucleic acids in pBluescript
gcacttttcggggaaatgtgcgcggaacccctatttgtttatttttctaaatacattcaaatatgtatccgctcatgagacaataaccctgataaatgcttcaataatattgaaaaaggaagagtatgagtattcaacatttccgtgtcgcccttattcccttttttgcggcattttgccttcctgtttttgctcacccagaaacgctggtgaaagtaaaagatgctgaagatcagttgggtgcacgagtgggttacatcgaactggatctcaacagcggtaagatccttgagagttttcgccccgaagaacgttttccaatgatgagcacttttaaagttctgctatgtggcgcggtattatcccgtattgacgccgggcaagagcaactcggtcgccgcatacactattctcagaatgacttggttgagtactcaccagtcacagaaaagcatcttacggatggcatgacagtaagagaattatgcagtgctgccataaccatgagtgataacactgcggccaacttacttctgacaacgatcggaggaccgaaggagctaaccgcttttttgcacaacatgggggatcatgtaactcgccttgatcgttgggaaccggagctgaatgaagccataccaaacgacgagcgtgacaccacgatgcctgtagcaatggcaacaacgttgcgcaaactattaactggcgaactacttactctagcttcccggcaacaattaatagactggatggaggcggataaagttgcaggaccacttctgcgctcggcccttccggctggctggtttattgctgataaatctggagccggtgagcgtgggtctcgcggtatcattgcagcactggggccagatggtaagccctcccgtatcgtagttatctacacgacggggagtcaggcaactatggatgaacgaaatagacagatcgctgagataggtgcctcactgattaagcattggtaactgtcagaccaagtttactcatatatactttagattgatttaaaacttcatttttaatttaaaaggatctaggtgaagatcctttttgataatctcatgaccaaaatcccttaacgtgagttttcgttccactgagcgtcagaccccgtagaaaagatcaaaggatcttcttgagatcctttttttctgcgcgtaatctgctgcttgcaaacaaaaaaaccaccgctaccagcggtggtttgtttgccggatcaagagctaccaactctttttccgaaggtaactggcttcagcagagcgcagataccaaatactgtccttctagtgtagccgtagttaggccaccacttcaagaactctgtagcaccgcctacatacctcgctctgctaatcctgttaccagtggctgctgccagtggcgataagtcgtgtcttaccgggttggactcaagacgatagttaccggataaggcgcagcggtcgggctgaacggggggttcgtgcacacagcccagcttggagcgaacgacctacaccgaactgagatacctacagcgtgagctatgagaaagcgccacgcttcccgaagggagaaaggcggacaggtatccggtaagcggcagggtcggaacaggagagcgcacgagggagcttccagggggaaacgcctggtatctttatagtcctgtcgggtttcgccacctctgacttgagcgtcgatttttgtgatgctcgtcaggggggcggagcctatggaaaaacgccagcaacgcggcctttttacggttcctggccttttgctggccttttgctcacatgttctttcctgcgttatcccctgattctgtggataaccgtattaccgcctttgagtgagctgataccgctcgccgcagccgaacgaccgagcgcagcgagtcagtgagcgaggaagcggaagagcgcccaatacgcaaaccgcctctccccgcgcgttggccgattcattaatgcagctggcacgacaggtttcccgactggaaagcgggcagtgagcgcaacgcaattaatgtgagttagctcactcattaggcaccccaggctttacactttatgcttccggctcgtatgttgtgtggaattgtgagcggataacaatttcacacaggaaacagcatatgcaaacaagcattactctgacatccaacgcatccggtacgtttgacggttactattacgaactctggaaggatactggcaatacaacaatgacggtctacactcaaggtcgcttttcctgccagtggtcgaacatcaataacgcgttgtttaggaccgggaagaaatacaaccagaattggcagtctcttggcacaatccggatcacgtactctgcgacttacaacccaaacgggaactcctacttgtgtatctatggctggtctaccaacccattggtcgagttctacatcgttgagtcctgggggaactggagaccgcctggtgccacgtccctgggccaagtgacaatcgatggcgggacctacgacatctataggacgacacgcgtcaaccagccttgcgtttcgggggactctaaggtcctgacggagaaggggccagtggagattcggcatctcaattcgggcatgatcgtgggcatcaatggcttcaagagcaggttcgtcaagttccaggagctgcaccaggtcaagtaccaggagtacggggttaagatccggacccagctcggcttcgaggtgaagtgcaccagggagcatcggttcctcacgattgacaagaacggcgagctgcgctgggttgaggcttggaggctcaaggagggcgattacgtggggatcattcgcaagctgccgtctcccaactcaaaggttctcatcctggacttcctcccggagtcgacgtacctctggctgaataaggagttcctcaagaagctgaaggtctctatcaaggagaagttcgggtcaattaagaactacgccaaggagcggggcttcaattccagctacctggtgaagcagctcaacgggctgtccccattccgctggggcaggctcagggttatcctgaatgatgtgtcgatcgagatttctcgggacgatatcgagcgcattacatcacgcaggggcaagtactccctcccaccagagctgactcctggcatcgctaggctcctggggttctggatggctagcggctcgctcaaccgcaataccctgatcttctactcgcaggacaagaagattctggagcgctacgaggatctgtgcaagcgcgagttcagggtcaaggggcggatcaaggcccaggacaagggcacgtacatcctggagattccctcgtctctcctgtctttcgtcttcaagaacctcgcgcgcccaaagctggaggttccaccgatcatctacatcctgcctgagaagcacaaggaggagttcctcgctggctacttcgacggcaacgggttcatcaagattgagaatgggaggatccattccctcggcttcttcgccttcaaccgcaagttcgcggaggggatcagggatattctcctgcagctcggcatcctgtcatccattaatgagcagacattcgaggtgagcatcattgagggcgagaagttcctgaagatcgtcaactcctggcgcagcaattactacaaggagtgggaggacgtgatcccgaacctggagaagaggctgaaggagattgaggagaagctcggctaccccgggacttacaatcggcgcgagatcaggcggtccgagctcaaggcgatcattaagctgtacgagaaggtggctcgggagaggggcctgaacgacgtcctcaaggagctgagctacctcaaggagctgtcggagggcgacatcttcttcgataggatcaccagcattgagccagtgtacctcgatgtcgcgtacggcatcatcaactcagagacaggcaactacgtggttaatggcttcgtttcaaagaactccattgtggggacagccacgttcgatcagtactggagcgtgcgcacctctaagcggacttcaggaacagtgaccgtgaccgatcacttccgcgcctgggcgaaccggggcctgaacctcggcacaatagaccaaattacattgtgcgtggagggttaccaaagctctggatcagccaacatcacccagaacaccttctctcagggctcttcttccggcagttcgggtggctcatccggctccacaacgactactcgcatcgagtgtgagaacatgtccttgtccggaccctacgttagcaggatcaccaatccctttaatggtattgcgctgtacgccaacggagacacagcccgcgctaccgttaacttccccgcaagtcgcaactacaatttccgcctgcggggttgcggcaacaacaataatcttgcccgtgtggacctgaggatcgacggacggaccgtcgggaccttttattaccagggcacatacccctgggaggccccaattgacaatgtttatgtcagtgcggggagtcatacagtcgaaatcactgttactgcggataacggcacatgggacgtgtatgccgactacctggtgatacagtgactcgagggggggcccggtacccaattcgccctatagtgagtcgtattacaattcactggccgtcgttttacaacgtcgtgactgggaaaaccctggcgttacccaacttaatcgccttgcagcacatccccctttcgccagctggcgtaatagcgaagaggcccgcaccgatcgcccttcccaacagttgcgcagcctgaatggcgaatggaaattgtaagcgttaatattttgttaaaattcgcgttaaatttttgttaaatcagctcattttttaaccaataggccgaaatcggcaaaatcccttataaatcaaaagaatagaccgagatagggttgagtgttgttccagtttggaacaagagtccactattaaagaacgtggactccaacgtcaaagggcgaaaaaccgtctatcagggcgatggcccactacgtgaaccatcaccctaatcaagttttttggggtcgaggtgccgtaaagcactaaatcggaaccctaaagggagcccccgatttagagcttgacggggaaagccggcgaacgtggcgagaaaggaagggaagaaagcgaaaggagcgggcgctagggcgctggcaagtgtagcggtcacgctgcgcgtaaccaccacacccgccgcgcttaatgcgccgctacagggcgcgtcaggtg

SEQ ID NO: 3105 - DNA, 5252 bp, Artificial Sequence
  Synthetic Construct, AS-105 intein modified protein encoding nucleic acids in pBluescript
gcacttttcggggaaatgtgcgcggaacccctatttgtttatttttctaaatacattcaaatatgtatccgctcatgagacaataaccctgataaatgcttcaataatattgaaaaaggaagagtatgagtattcaacatttccgtgtcgcccttattcccttttttgcggcattttgccttcctgtttttgctcacccagaaacgctggtgaaagtaaaagatgctgaagatcagttgggtgcacgagtgggttacatcgaactggatctcaacagcggtaagatccttgagagttttcgccccgaagaacgttttccaatgatgagcacttttaaagttctgctatgtggcgcggtattatcccgtattgacgccgggcaagagcaactcggtcgccgcatacactattctcagaatgacttggttgagtactcaccagtcacagaaaagcatcttacggatggcatgacagtaagagaattatgcagtgctgccataaccatgagtgataacactgcggccaacttacttctgacaacgatcggaggaccgaaggagctaaccgcttttttgcacaacatgggggatcatgtaactcgccttgatcgttgggaaccggagctgaatgaagccataccaaacgacgagcgtgacaccacgatgcctgtagcaatggcaacaacgttgcgcaaactattaactggcgaactacttactctagcttcccggcaacaattaatagactggatggaggcggataaagttgcaggaccacttctgcgctcggcccttccggctggctggtttattgctgataaatctggagccggtgagcgtgggtctcgcggtatcattgcagcactggggccagatggtaagccctcccgtatcgtagttatctacacgacggggagtcaggcaactatggatgaacgaaatagacagatcgctgagataggtgcctcactgattaagcattggtaactgtcagaccaagtttactcatatatactttagattgatttaaaacttcatttttaatttaaaaggatctaggtgaagatcctttttgataatctcatgaccaaaatcccttaacgtgagttttcgttccactgagcgtcagaccccgtagaaaagatcaaaggatcttcttgagatcctttttttctgcgcgtaatctgctgcttgcaaacaaaaaaaccaccgctaccagcggtggtttgtttgccggatcaagagctaccaactctttttccgaaggtaactggcttcagcagagcgcagataccaaatactgtccttctagtgtagccgtagttaggccaccacttcaagaactctgtagcaccgcctacatacctcgctctgctaatcctgttaccagtggctgctgccagtggcgataagtcgtgtcttaccgggttggactcaagacgatagttaccggataaggcgcagcggtcgggctgaacggggggttcgtgcacacagcccagcttggagcgaacgacctacaccgaactgagatacctacagcgtgagctatgagaaagcgccacgcttcccgaagggagaaaggcggacaggtatccggtaagcggcagggtcggaacaggagagcgcacgagggagcttccagggggaaacgcctggtatctttatagtcctgtcgggtttcgccacctctgacttgagcgtcgatttttgtgatgctcgtcaggggggcggagcctatggaaaaacgccagcaacgcggcctttttacggttcctggccttttgctggccttttgctcacatgttctttcctgcgttatcccctgattctgtggataaccgtattaccgcctttgagtgagctgataccgctcgccgcagccgaacgaccgagcgcagcgagtcagtgagcgaggaagcggaagagcgcccaatacgcaaaccgcctctccccgcgcgttggccgattcattaatgcagctggcacgacaggtttcccgactggaaagcgggcagtgagcgcaacgcaattaatgtgagttagctcactcattaggcaccccaggctttacactttatgcttccggctcgtatgttgtgtggaattgtgagcggataacaatttcacacaggaaacagcatatgcaaacaagcattactctgacatccaacgcatccggtacgtttgacggttactattacgaactctggaaggatactggcaatacaacaatgacggtctacactcaaggtcgcttttcctgccagtggtcgaacatcaataacgcgttgtttaggaccgggaagaaatacaaccagaattggcagtctcttggcacaatccggatcacgtactctgcgacttacaacccaaacgggaactcctacttgtgtatctatggctggtctaccaacccattggtcgagttctacatcgttgagtcctgggggaactggagaccgcctggtgccacgtccctgggccaagtgacaatcgatggcgggacctacgacatctataggacgacacgcgtcaaccagccttgcttctcaggggaggaggttattatcgtggagaagggcaaggaccgcaaggtcgttaagctgcgggagttcgtggaggacgctctcaaggagccatccggcgaggggatggacggcgatatcaaggtgacatacaaggacctgcgcggcgaggatgtcaggattctcactaaggacgggttcgtgaagctcctctacgtgaacaagcgcgagggcaagcagaagctcaggaagatcgtcaatctggacaaggattactggctcgccgttacacctgaccacaaggtgttcacttctgagggcctgaaggaggcgggggagatcacggagaaggacgagatcattagggtcccactcgttatcctggatggccctaagattgcctcaacatacggcgaggacgggaagttcgacgattacatccgctggaagaagtactacgagaagactggcaacgggtacaagcgcgccgcgaaggagctgaatatcaaggagagcaccctcaggtggtggacgcagggcgctaagccaaactcgctgaagatgatcgaggagctggagaagctgaatctcctgcctctgacctctgaggactcacggctggagaaggtcgccatcattctcggcgcgctgttctcagacgggaacatcgatcgcaacttcaataccctctccttcatctccagcgagcggaaggccattgagcgcttcgtggagacgctcaaggagctgttcggcgagttcaactacgagatcagggataatcatgagtccctcggcaagagcattctgttccggacctgggaccgcaggatcattcgcttcttcgtcgcgctgggcgctccggttgggaacaagacgaaggtgaagctggagctgccgtggtggatcaagctgaagccctcgctcttcctggccttcatggacggcctctactcgggcgatgggtctgtcccaaggttcgctcgctacgaggagggcatcaagttcaacgggaccttcgagattgctcagctgacggacgatgtggagaagaagctccccttcttcgaggagatcgcttggtacctctccttcttcggcattaaggccaaggttagggtggacaagacaggggataagtacaaggttcggctgatcttctcacagtccattgacaacgtgctcaatttcctggagttcatcccgattagcctctcgcccgctaagagggagaagttcctgcgggaggtcgagtcctacctcgctgctgttccagagtcgtctctggctggcaggatcgaggagctcagggagcacttcaaccggatcaagaagggcgagcggcgcagcttcattgagacctgggaggtggtcaatgtgacctacaatgttactacggagacaggcaatctgctcgctaatgggctcttcgttaagaactccattgtggggacagccacgttcgatcagtactggagcgtgcgcacctctaagcggacttcaggaacagtgaccgtgaccgatcacttccgcgcctgggcgaaccggggcctgaacctcggcacaatagaccaaattacattgtgcgtggagggttaccaaagctctggatcagccaacatcacccagaacaccttctctcagggctcttcttccggcagttcgggtggctcatccggctccacaacgactactcgcatcgagtgtgagaacatgtccttgtccggaccctacgttagcaggatcaccaatccctttaatggtattgcgctgtacgccaacggagacacagcccgcgctaccgttaacttccccgcaagtcgcaactacaatttccgcctgcggggttgcggcaacaacaataatcttgcccgtgtggacctgaggatcgacggacggaccgtcgggaccttttattaccagggcacatacccctgggaggccccaattgacaatgtttatgtcagtgcggggagtcatacagtcgaaatcactgttactgcggataacggcacatgggacgtgtatgccgactacctggtgatacagtgactcgagggggggcccggtacccaattcgccctatagtgagtcgtattacaattcactggccgtcgttttacaacgtcgtgactgggaaaaccctggcgttacccaacttaatcgccttgcagcacatccccctttcgccagctggcgtaatagcgaagaggcccgcaccgatcgcccttcccaacagttgcgcagcctgaatggcgaatggaaattgtaagcgttaatattttgttaaaattcgcgttaaatttttgttaaatcagctcattttttaaccaataggccgaaatcggcaaaatcccttataaatcaaaagaatagaccgagatagggttgagtgttgttccagtttggaacaagagtccactattaaagaacgtggactccaacgtcaaagggcgaaaaaccgtctatcagggcgatggcccactacgtgaaccatcaccctaatcaagttttttggggtcgaggtgccgtaaagcactaaatcggaaccctaaagggagcccccgatttagagcttgacggggaaagccggcgaacgtggcgagaaaggaagggaagaaagcgaaaggagcgggcgctagggcgctggcaagtgtagcggtcacgctgcgcgtaaccaccacacccgccgcgcttaatgcgccgctacagggcgcgtcaggtg

SEQ ID NO: 3106 - DNA, 5210 bp, Artificial Sequence
  Synthetic Construct, AS-106 intein modified protein encoding nucleic acids in pBluescript
gcacttttcggggaaatgtgcgcggaacccctatttgtttatttttctaaatacattcaaatatgtatccgctcatgagacaataaccctgataaatgcttcaataatattgaaaaaggaagagtatgagtattcaacatttccgtgtcgcccttattcccttttttgcggcattttgccttcctgtttttgctcacccagaaacgctggtgaaagtaaaagatgctgaagatcagttgggtgcacgagtgggttacatcgaactggatctcaacagcggtaagatccttgagagttttcgccccgaagaacgttttccaatgatgagcacttttaaagttctgctatgtggcgcggtattatcccgtattgacgccgggcaagagcaactcggtcgccgcatacactattctcagaatgacttggttgagtactcaccagtcacagaaaagcatcttacggatggcatgacagtaagagaattatgcagtgctgccataaccatgagtgataacactgcggccaacttacttctgacaacgatcggaggaccgaaggagctaaccgcttttttgcacaacatgggggatcatgtaactcgccttgatcgttgggaaccggagctgaatgaagccataccaaacgacgagcgtgacaccacgatgcctgtagcaatggcaacaacgttgcgcaaactattaactggcgaactacttactctagcttcccggcaacaattaatagactggatggaggcggataaagttgcaggaccacttctgcgctcggcccttccggctggctggtttattgctgataaatctggagccggtgagcgtgggtctcgcggtatcattgcagcactggggccagatggtaagccctcccgtatcgtagttatctacacgacggggagtcaggcaactatggatgaacgaaatagacagatcgctgagataggtgcctcactgattaagcattggtaactgtcagaccaagtttactcatatatactttagattgatttaaaacttcatttttaatttaaaaggatctaggtgaagatcctttttgataatctcatgaccaaaatcccttaacgtgagttttcgttccactgagcgtcagaccccgtagaaaagatcaaaggatcttcttgagatcctttttttctgcgcgtaatctgctgcttgcaaacaaaaaaaccaccgctaccagcggtggtttgtttgccggatcaagagctaccaactctttttccgaaggtaactggcttcagcagagcgcagataccaaatactgtccttctagtgtagccgtagttaggccaccacttcaagaactctgtagcaccgcctacatacctcgctctgctaatcctgttaccagtggctgctgccagtggcgataagtcgtgtcttaccgggttggactcaagacgatagttaccggataaggcgcagcggtcgggctgaacggggggttcgtgcacacagcccagcttggagcgaacgacctacaccgaactgagatacctacagcgtgagctatgagaaagcgccacgcttcccgaagggagaaaggcggacaggtatccggtaagcggcagggtcggaacaggagagcgcacgagggagcttccagggggaaacgcctggtatctttatagtcctgtcgggtttcgccacctctgacttgagcgtcgatttttgtgatgctcgtcaggggggcggagcctatggaaaaacgccagcaacgcggcctttttacggttcctggccttttgctggccttttgctcacatgttctttcctgcgttatcccctgattctgtggataaccgtattaccgcctttgagtgagctgataccgctcgccgcagccgaacgaccgagcgcagcgagtcagtgagcgaggaagcggaagagcgcccaatacgcaaaccgcctctccccgcgcgttggccgattcattaatgcagctggcacgacaggtttcccgactggaaagcgggcagtgagcgcaacgcaattaatgtgagttagctcactcattaggcaccccaggctttacactttatgcttccggctcgtatgttgtgtggaattgtgagcggataacaatttcacacaggaaacagcatatgcaaacaagcattactctgacatccaacgcatccggtacgtttgacggttactattacgaactctggaaggatactggcaatacaacaatgacggtctacactcaaggtcgcttttcctgccagtggtcgaacatcaataacgcgttgtttaggaccgggaagaaatacaaccagaattggcagtctcttggcacaatccggatcacgtactctgcgacttacaacccaaacgggaactcctacttgtgtatctatggctggtctaccaacccattggtcgagttctacatcgttgagtcctgggggaactggagaccgcctggtgccacgtccctgggccaagtgacaatcgatggcgggacctacgacatctataggacgacacgcgtcaaccagccttctatcctccctgatgagtggctgcctatcgtggagaatgagaaggttcggttcgttaagatcggggatttcattgatcgggagatcgaggagaacgccgagcgcgttaagagggacggcgagaccgagatcctggaggtgaaggatctcaaggccctgtccttcaatcgcgagacgaagaagagcgagctcaagaaggtcaaggcgctgatccgccacaggtactccggcaaggtgtacagcattaagctcaagtcggggcgcaggatcaagattacctcaggccattccctgttcagcgtcaagaacggcaagctcgttaaggtgcggggggacgagctcaagccaggcgatctggtggtcgttccaggccgcctcaagctgcctgagtcgaagcaggtgctcaacctggtcgagctcctgctcaagctgccagaggaggagacgtctaacatcgtcatgatgattcctgttaaggggcgcaagaatttcttcaagggcatgctcaagacactgtactggatcttcggcgagggggagaggccaaggactgctggcaggtacctcaagcacctggagaggctcggctacgtgaagctcaagaggaggggctgcgaggttctcgactgggagtccctgaagaggtaccggaagctgtacgagacactcatcaagaacctgaagtacaacggcaatagccgcgcttacatggtggagttcaattctctcagggacgtggtctcactgatgccgatcgaggagctcaaggagtggatcattggcgagccgagggggccaaagatcggcactttcattgatgtcgacgattcgttcgcgaagctgctcgggtactacatctccagcggcgacgtggagaaggatagggtcaagttccactccaaggaccagaacgtgctggaggatatcgccaagctcgcggagaagctgttcgggaaggtgaggaggggcagggggtacattgaggtcagcggcaagatctcgcatgctattttcagggtcctcgctgaggggaagcggatcccggagttcattttcaccagccccatggacatcaaggtggcgttcctgaagggcctcaacgggaatgctgaggagctgaccttctcgacgaagtctgagctgctcgtcaaccagctcatcctgctcctcaactccattggggtgtcagatatcaagattgagcatgagaagggcgtctacagggtttacatcaacaagaaggagtcgtctaatggcgacatcgttctggattcagtggagtccattgaggttgagaagtacgagggctacgtgtacgacctctctgtggaggataatgagaatttcctcgtgggcttcgggctgctctacgctcataattccattgtggggacagccacgttcgatcagtactggagcgtgcgcacctctaagcggacttcaggaacagtgaccgtgaccgatcacttccgcgcctgggcgaaccggggcctgaacctcggcacaatagaccaaattacattgtgcgtggagggttaccaaagctctggatcagccaacatcacccagaacaccttctctcagggctcttcttccggcagttcgggtggctcatccggctccacaacgactactcgcatcgagtgtgagaacatgtccttgtccggaccctacgttagcaggatcaccaatccctttaatggtattgcgctgtacgccaacggagacacagcccgcgctaccgttaacttccccgcaagtcgcaactacaatttccgcctgcggggttgcggcaacaacaataatcttgcccgtgtggacctgaggatcgacggacggaccgtcgggaccttttattaccagggcacatacccctgggaggccccaattgacaatgtttatgtcagtgcggggagtcatacagtcgaaatcactgttactgcggataacggcacatgggacgtgtatgccgactacctggtgatacagtgactcgagggggggcccggtacccaattcgccctatagtgagtcgtattacaattcactggccgtcgttttacaacgtcgtgactgggaaaaccctggcgttacccaacttaatcgccttgcagcacatccccctttcgccagctggcgtaatagcgaagaggcccgcaccgatcgcccttcccaacagttgcgcagcctgaatggcgaatggaaattgtaagcgttaatattttgttaaaattcgcgttaaatttttgttaaatcagctcattttttaaccaataggccgaaatcggcaaaatcccttataaatcaaaagaatagaccgagatagggttgagtgttgttccagtttggaacaagagtccactattaaagaacgtggactccaacgtcaaagggcgaaaaaccgtctatcagggcgatggcccactacgtgaaccatcaccctaatcaagttttttggggtcgaggtgccgtaaagcactaaatcggaaccctaaagggagcccccgatttagagcttgacggggaaagccggcgaacgtggcgagaaaggaagggaagaaagcgaaaggagcgggcgctagggcgctggcaagtgtagcggtcacgctgcgcgtaaccaccacacccgccgcgcttaatgcgccgctacagggcgcgtcaggtg

SEQ ID NO: 3107 - DNA, 4346 bp, Artificial Sequence
  Synthetic Construct, AS-107 intein modified protein encoding nucleic acids in pBluescript
gcacttttcggggaaatgtgcgcggaacccctatttgtttatttttctaaatacattcaaatatgtatccgctcatgagacaataaccctgataaatgcttcaataatattgaaaaaggaagagtatgagtattcaacatttccgtgtcgcccttattcccttttttgcggcattttgccttcctgtttttgctcacccagaaacgctggtgaaagtaaaagatgctgaagatcagttgggtgcacgagtgggttacatcgaactggatctcaacagcggtaagatccttgagagttttcgccccgaagaacgttttccaatgatgagcacttttaaagttctgctatgtggcgcggtattatcccgtattgacgccgggcaagagcaactcggtcgccgcatacactattctcagaatgacttggttgagtactcaccagtcacagaaaagcatcttacggatggcatgacagtaagagaattatgcagtgctgccataaccatgagtgataacactgcggccaacttacttctgacaacgatcggaggaccgaaggagctaaccgcttttttgcacaacatgggggatcatgtaactcgccttgatcgttgggaaccggagctgaatgaagccataccaaacgacgagcgtgacaccacgatgcctgtagcaatggcaacaacgttgcgcaaactattaactggcgaactacttactctagcttcccggcaacaattaatagactggatggaggcggataaagttgcaggaccacttctgcgctcggcccttccggctggctggtttattgctgataaatctggagccggtgagcgtgggtctcgcggtatcattgcagcactggggccagatggtaagccctcccgtatcgtagttatctacacgacggggagtcaggcaactatggatgaacgaaatagacagatcgctgagataggtgcctcactgattaagcattggtaactgtcagaccaagtttactcatatatactttagattgatttaaaacttcatttttaatttaaaaggatctaggtgaagatcctttttgataatctcatgaccaaaatcccttaacgtgagttttcgttccactgagcgtcagaccccgtagaaaagatcaaaggatcttcttgagatcctttttttctgcgcgtaatctgctgcttgcaaacaaaaaaaccaccgctaccagcggtggtttgtttgccggatcaagagctaccaactctttttccgaaggtaactggcttcagcagagcgcagataccaaatactgtccttctagtgtagccgtagttaggccaccacttcaagaactctgtagcaccgcctacatacctcgctctgctaatcctgttaccagtggctgctgccagtggcgataagtcgtgtcttaccgggttggactcaagacgatagttaccggataaggcgcagcggtcgggctgaacggggggttcgtgcacacagcccagcttggagcgaacgacctacaccgaactgagatacctacagcgtgagctatgagaaagcgccacgcttcccgaagggagaaaggcggacaggtatccggtaagcggcagggtcggaacaggagagcgcacgagggagcttccagggggaaacgcctggtatctttatagtcctgtcgggtttcgccacctctgacttgagcgtcgatttttgtgatgctcgtcaggggggcggagcctatggaaaaacgccagcaacgcggcctttttacggttcctggccttttgctggccttttgctcacatgttctttcctgcgttatcccctgattctgtggataaccgtattaccgcctttgagtgagctgataccgctcgccgcagccgaacgaccgagcgcagcgagtcagtgagcgaggaagcggaagagcgcccaatacgcaaaccgcctctccccgcgcgttggccgattcattaatgcagctggcacgacaggtttcccgactggaaagcgggcagtgagcgcaacgcaattaatgtgagttagctcactcattaggcaccccaggctttacactttatgcttccggctcgtatgttgtgtggaattgtgagcggataacaatttcacacaggaaacagcatatgcaaacaagcattactctgacatccaacgcatccggtacgtttgacggttactattacgaactctggaaggatactggcaatacaacaatgacggtctacactcaaggtcgcttttcctgccagtggtcgaacatcaataacgcgttgtttaggaccgggaagaaatacaaccagaattggcagtctcttggcacaatccggatcacgtactctgcgacttacaacccaaacgggaactcctacttgtgtatctatggctggtctaccaacccattggtcgagttctacatcgttgagtcctgggggaactggagaccgcctggtgccacgtccctgggccaagtgacaatcgatggcgggacctacgacatctataggacgacacgcgtcaaccagccttgcttcgctagggatacggaggtttactacgagaatgacacagttccgcacatggagtcaatcgaggagatgtactcaaagtacgcttccatgaacggcgagctcccgttcgacaatgggtacgcggtcccactcgataacgtgttcgtctacaccctggacatcgctagcggcgagattaagaagacgcgcgcctcgtacatctacagggagaaggtggagaagctcatcgagattaagctgtccagcggctactcactcaaggttacaccatcccacccagtgctcctgttccgggatgggctgcagtgggtgccagctgctgaggtcaagcctggcgacgtggtcgttggggtccgcgaggaggttctcaggaggcggatcatttccaagggcgagctggagttccatgaggtttcgtctgtgaggatcattgattacaacaattgggtctacgatctcgtcattccagagactcataacttcattgctccaaatgggctcgtgctccacaactccattgtggggacagccacgttcgatcagtactggagcgtgcgcacctctaagcggacttcaggaacagtgaccgtgaccgatcacttccgcgcctgggcgaaccggggcctgaacctcggcacaatagaccaaattacattgtgcgtggagggttaccaaagctctggatcagccaacatcacccagaacaccttctctcagggctcttcttccggcagttcgggtggctcatccggctccacaacgactactcgcatcgagtgtgagaacatgtccttgtccggaccctacgttagcaggatcaccaatccctttaatggtattgcgctgtacgccaacggagacacagcccgcgctaccgttaacttccccgcaagtcgcaactacaatttccgcctgcggggttgcggcaacaacaataatcttgcccgtgtggacctgaggatcgacggacggaccgtcgggaccttttattaccagggcacatacccctgggaggccccaattgacaatgtttatgtcagtgcggggagtcatacagtcgaaatcactgttactgcggataacggcacatgggacgtgtatgccgactacctggtgatacagtgactcgagggggggcccggtacccaattcgccctatagtgagtcgtattacaattcactggccgtcgttttacaacgtcgtgactgggaaaaccctggcgttacccaacttaatcgccttgcagcacatccccctttcgccagctggcgtaatagcgaagaggcccgcaccgatcgcccttcccaacagttgcgcagcctgaatggcgaatggaaattgtaagcgttaatattttgttaaaattcgcgttaaatttttgttaaatcagctcattttttaaccaataggccgaaatcggcaaaatcccttataaatcaaaagaatagaccgagatagggttgagtgttgttccagtttggaacaagagtccactattaaagaacgtggactccaacgtcaaagggcgaaaaaccgtctatcagggcgatggcccactacgtgaaccatcaccctaatcaagttttttggggtcgaggtgccgtaaagcactaaatcggaaccctaaagggagcccccgatttagagcttgacggggaaagccggcgaacgtggcgagaaaggaagggaagaaagcgaaaggagcgggcgctagggcgctggcaagtgtagcggtcacgctgcgcgtaaccaccacacccgccgcgcttaatgcgccgctacagggcgcgtcaggtg

SEQ ID NO: 3108 - DNA, 5060 bp, Artificial Sequence
  Synthetic Construct, AS-108 intein modified protein encoding nucleic acids in pBluescript
gcacttttcggggaaatgtgcgcggaacccctatttgtttatttttctaaatacattcaaatatgtatccgctcatgagacaataaccctgataaatgcttcaataatattgaaaaaggaagagtatgagtattcaacatttccgtgtcgcccttattcccttttttgcggcattttgccttcctgtttttgctcacccagaaacgctggtgaaagtaaaagatgctgaagatcagttgggtgcacgagtgggttacatcgaactggatctcaacagcggtaagatccttgagagttttcgccccgaagaacgttttccaatgatgagcacttttaaagttctgctatgtggcgcggtattatcccgtattgacgccgggcaagagcaactcggtcgccgcatacactattctcagaatgacttggttgagtactcaccagtcacagaaaagcatcttacggatggcatgacagtaagagaattatgcagtgctgccataaccatgagtgataacactgcggccaacttacttctgacaacgatcggaggaccgaaggagctaaccgcttttttgcacaacatgggggatcatgtaactcgccttgatcgttgggaaccggagctgaatgaagccataccaaacgacgagcgtgacaccacgatgcctgtagcaatggcaacaacgttgcgcaaactattaactggcgaactacttactctagcttcccggcaacaattaatagactggatggaggcggataaagttgcaggaccacttctgcgctcggcccttccggctggctggtttattgctgataaatctggagccggtgagcgtgggtctcgcggtatcattgcagcactggggccagatggtaagccctcccgtatcgtagttatctacacgacggggagtcaggcaactatggatgaacgaaatagacagatcgctgagataggtgcctcactgattaagcattggtaactgtcagaccaagtttactcatatatactttagattgatttaaaacttcatttttaatttaaaaggatctaggtgaagatcctttttgataatctcatgaccaaaatcccttaacgtgagttttcgttccactgagcgtcagaccccgtagaaaagatcaaaggatcttcttgagatcctttttttctgcgcgtaatctgctgcttgcaaacaaaaaaaccaccgctaccagcggtggtttgtttgccggatcaagagctaccaactctttttccgaaggtaactggcttcagcagagcgcagataccaaatactgtccttctagtgtagccgtagttaggccaccacttcaagaactctgtagcaccgcctacatacctcgctctgctaatcctgttaccagtggctgctgccagtggcgataagtcgtgtcttaccgggttggactcaagacgatagttaccggataaggcgcagcggtcgggctgaacggggggttcgtgcacacagcccagcttggagcgaacgacctacaccgaactgagatacctacagcgtgagctatgagaaagcgccacgcttcccgaagggagaaaggcggacaggtatccggtaagcggcagggtcggaacaggagagcgcacgagggagcttccagggggaaacgcctggtatctttatagtcctgtcgggtttcgccacctctgacttgagcgtcgatttttgtgatgctcgtcaggggggcggagcctatggaaaaacgccagcaacgcggcctttttacggttcctggccttttgctggccttttgctcacatgttctttcctgcgttatcccctgattctgtggataaccgtattaccgcctttgagtgagctgataccgctcgccgcagccgaacgaccgagcgcagcgagtcagtgagcgaggaagcggaagagcgcccaatacgcaaaccgcctctccccgcgcgttggccgattcattaatgcagctggcacgacaggtttcccgactggaaagcgggcagtgagcgcaacgcaattaatgtgagttagctcactcattaggcaccccaggctttacactttatgcttccggctcgtatgttgtgtggaattgtgagcggataacaatttcacacaggaaacagcatatgcaaacaagcattactctgacatccaacgcatccggtacgtttgacggttactattacgaactctggaaggatactggcaatacaacaatgacggtctacactcaaggtcgcttttcctgccagtggtcgaacatcaataacgcgttgtttaggaccgggaagaaatacaaccagaattggcagtctcttggcacaatccggatcacgtactctgcgacttacaacccaaacgggaactcctacttgtgtatctatggctggtctaccaacccattggtcgagttctacatcgttgagtcctgggggaactggagaccgcctggtgccacgtccctgggccaagtgacaatcgatggcgggacctacgacatctataggacgacacgcgtcaaccagccttgcgttaccccagacacgctggtttcgctctcggacgggcggattattgagatcagggaggcggtggagaactcggaggagtcgctgctcgggatcaacggcctgaagccgaaggaggccaaggcgctcaagttctgggagatcgactgggatgggccgatcaaggtcatcaagctgaagaatggccacgagatcaaggctaccccagaccatgggctcctggttatgagggatgggaagatcggctgggtgtcggctaagaacattcgggagggcgactacgtcgccttcatctacaatctcgggcaccgcggcgggaagaagtacacgctcccccagctcctgaaggagctgggcatctccgagtacgagaactccagctcgcaggagctcaacaatcgcgagcaggagatggactccaagcagatcagcattgagctggatgagaggttctggtacatcttcggcgtgattctcggcaaggggaccctgaagggggacaaggtggtcatcttccagaaggatgtcaagccggttattgaggaggcgctgcccttcgtccggatcttcgagtcggctgaccacatcggcttctctcatctcattctggctgaggtcttccgcaggctcggcgttggggagggcaagctccactccctggtgttcggcctgagggaggagtacatcaacgctatgattgccgggtacttcgacgctagcggcaccttcctcaggagggctgtcctgacgagcaagcgcggcgatatcctcaggatgctgtcggtgtacctctaccagatcggcattgtcaacaatctgaggagggacgagcatgctggcgtgtgggagctcatcatttctgatctggagaagttccgcgagaagatctacccttacctcaggattaagaagtcacagttcgacaaggtctactctatttcaaagaacgagggcgatttcctcccggttgcgtctatcttccggaagctgaagttccgcgacggcttcaagaatcggatcctcgacgaggagattccacgcgatgaggtggcgaaggtcctggagtacgctgaggactcacctgagaaggagttcctcaactccctggttgaggccagggtgacatgggttcgggtggagaagatcgaggagaggcattacactggcaagctctacgacttcacaactactacagagaacttcatttccaatggcatcgtctcacacaactccattgtggggacagccacgttcgatcagtactggagcgtgcgcacctctaagcggacttcaggaacagtgaccgtgaccgatcacttccgcgcctgggcgaaccggggcctgaacctcggcacaatagaccaaattacattgtgcgtggagggttaccaaagctctggatcagccaacatcacccagaacaccttctctcagggctcttcttccggcagttcgggtggctcatccggctccacaacgactactcgcatcgagtgtgagaacatgtccttgtccggaccctacgttagcaggatcaccaatccctttaatggtattgcgctgtacgccaacggagacacagcccgcgctaccgttaacttccccgcaagtcgcaactacaatttccgcctgcggggttgcggcaacaacaataatcttgcccgtgtggacctgaggatcgacggacggaccgtcgggaccttttattaccagggcacatacccctgggaggccccaattgacaatgtttatgtcagtgcggggagtcatacagtcgaaatcactgttactgcggataacggcacatgggacgtgtatgccgactacctggtgatacagtgactcgagggggggcccggtacccaattcgccctatagtgagtcgtattacaattcactggccgtcgttttacaacgtcgtgactgggaaaaccctggcgttacccaacttaatcgccttgcagcacatccccctttcgccagctggcgtaatagcgaagaggcccgcaccgatcgcccttcccaacagttgcgcagcctgaatggcgaatggaaattgtaagcgttaatattttgttaaaattcgcgttaaatttttgttaaatcagctcattttttaaccaataggccgaaatcggcaaaatcccttataaatcaaaagaatagaccgagatagggttgagtgttgttccagtttggaacaagagtccactattaaagaacgtggactccaacgtcaaagggcgaaaaaccgtctatcagggcgatggcccactacgtgaaccatcaccctaatcaagttttttggggtcgaggtgccgtaaagcactaaatcggaaccctaaagggagcccccgatttagagcttgacggggaaagccggcgaacgtggcgagaaaggaagggaagaaagcgaaaggagcgggcgctagggcgctggcaagtgtagcggtcacgctgcgcgtaaccaccacacccgccgcgcttaatgcgccgctacagggcgcgtcaggtg

SEQ ID NO: 3109 - DNA, 5000 bp, Artificial Sequence
  Synthetic Construct, AS-109 intein modified protein encoding nucleic acids in pBluescript
gcacttttcggggaaatgtgcgcggaacccctatttgtttatttttctaaatacattcaaatatgtatccgctcatgagacaataaccctgataaatgcttcaataatattgaaaaaggaagagtatgagtattcaacatttccgtgtcgcccttattcccttttttgcggcattttgccttcctgtttttgctcacccagaaacgctggtgaaagtaaaagatgctgaagatcagttgggtgcacgagtgggttacatcgaactggatctcaacagcggtaagatccttgagagttttcgccccgaagaacgttttccaatgatgagcacttttaaagttctgctatgtggcgcggtattatcccgtattgacgccgggcaagagcaactcggtcgccgcatacactattctcagaatgacttggttgagtactcaccagtcacagaaaagcatcttacggatggcatgacagtaagagaattatgcagtgctgccataaccatgagtgataacactgcggccaacttacttctgacaacgatcggaggaccgaaggagctaaccgcttttttgcacaacatgggggatcatgtaactcgccttgatcgttgggaaccggagctgaatgaagccataccaaacgacgagcgtgacaccacgatgcctgtagcaatggcaacaacgttgcgcaaactattaactggcgaactacttactctagcttcccggcaacaattaatagactggatggaggcggataaagttgcaggaccacttctgcgctcggcccttccggctggctggtttattgctgataaatctggagccggtgagcgtgggtctcgcggtatcattgcagcactggggccagatggtaagccctcccgtatcgtagttatctacacgacggggagtcaggcaactatggatgaacgaaatagacagatcgctgagataggtgcctcactgattaagcattggtaactgtcagaccaagtttactcatatatactttagattgatttaaaacttcatttttaatttaaaaggatctaggtgaagatcctttttgataatctcatgaccaaaatcccttaacgtgagttttcgttccactgagcgtcagaccccgtagaaaagatcaaaggatcttcttgagatcctttttttctgcgcgtaatctgctgcttgcaaacaaaaaaaccaccgctaccagcggtggtttgtttgccggatcaagagctaccaactctttttccgaaggtaactggcttcagcagagcgcagataccaaatactgtccttctagtgtagccgtagttaggccaccacttcaagaactctgtagcaccgcctacatacctcgctctgctaatcctgttaccagtggctgctgccagtggcgataagtcgtgtcttaccgggttggactcaagacgatagttaccggataaggcgcagcggtcgggctgaacggggggttcgtgcacacagcccagcttggagcgaacgacctacaccgaactgagatacctacagcgtgagctatgagaaagcgccacgcttcccgaagggagaaaggcggacaggtatccggtaagcggcagggtcggaacaggagagcgcacgagggagcttccagggggaaacgcctggtatctttatagtcctgtcgggtttcgccacctctgacttgagcgtcgatttttgtgatgctcgtcaggggggcggagcctatggaaaaacgccagcaacgcggcctttttacggttcctggccttttgctggccttttgctcacatgttctttcctgcgttatcccctgattctgtggataaccgtattaccgcctttgagtgagctgataccgctcgccgcagccgaacgaccgagcgcagcgagtcagtgagcgaggaagcggaagagcgcccaatacgcaaaccgcctctccccgcgcgttggccgattcattaatgcagctggcacgacaggtttcccgactggaaagcgggcagtgagcgcaacgcaattaatgtgagttagctcactcattaggcaccccaggctttacactttatgcttccggctcgtatgttgtgtggaattgtgagcggataacaatttcacacaggaaacagcatatgcaaacaagcattactctgacatccaacgcatccggtacgtttgacggttactattacgaactctggaaggatactggcaatacaacaatgacggtctacactcaaggtcgcttttcctgccagtggtcgaacatcaataacgcgttgtttaggaccgggaagaaatacaaccagaattggcagtctcttggcacaatccggatcacgtactctgcgacttacaacccaaacgggaactcctacttgtgtatctatggctggtctaccaacccattggtcgagttctacatcgttgagtcctgggggaactggagaccgcctggtgccacgtccctgggccaagtgacaatcgatggcgggacctacgacatctataggacgacacgcgtcaaccagccttgcctcgcgcctgggacaagggtcctgactgagcatggctactggctgaagattgaggagatgcctgagaagttcaagctgcagcggctccgcgtctacaacatcgaggagggccacaatgacttcagcaaggtggtcttcgtggctgagagggaggtcggctcggaggagaaggctatccgcattgtcacagagtccgggaaggttatcgagggcagcgaggaccatccagtgctcactcctgagggctacgtgtacctgaggaacgtgaaggagggcgattacatcctggtgtacccgttcgagggggtcccctacgaggagaagaagggcgtcattctcgacgagtccgctttcgagggcgaggatccgcaggttgtgaagttcctgcgcgagaggaacctcatcccactgcagtggaaggaccctaaagtgggcatcctcgctcggattctggggttcgctctcgcgaatggctacatcagcgagaacgataatctcaccttccacggcaaggaggaggtcctgagggaggttcggaaggacctggaggagctgggcatcgaggcgattgtcgctgaggaggataagctcaaggttacgtctagggagttcgctttcctcctggagaagctggggatggcccacgactcaatcccggagtggatcattgagggccccctctggattaagaggaacttcctcgctggcctgttcggggctaatggctcgatcgttgagttcaagggcgacgtgccgctgcccattaccctcacgcattcgcgggagctcctgaacgatgtctctcgcatcctggagggcttcaaggtgagggccaagattaagatggggaagaatggctcataccagctcgtcatcgaggacgaggattccattcgcaacttcctggggaggatcaattacgagtacgacccagagaagaaggccaggggcctcattgcttacgcctacctgaagttcaaggagctcatgaaggggaacctgatgaccttcgaggagttcgcccgggacaggggctacgagggcgggttcgtggcggagaaggtcatcgaggttaagagcgtgaagccggagtacgataagttctacgatattggggtctaccactcagctcataatttcattgctaatggcatcgtcgttcataactccattgtggggacagccacgttcgatcagtactggagcgtgcgcacctctaagcggacttcaggaacagtgaccgtgaccgatcacttccgcgcctgggcgaaccggggcctgaacctcggcacaatagaccaaattacattgtgcgtggagggttaccaaagctctggatcagccaacatcacccagaacaccttctctcagggctcttcttccggcagttcgggtggctcatccggctccacaacgactactcgcatcgagtgtgagaacatgtccttgtccggaccctacgttagcaggatcaccaatccctttaatggtattgcgctgtacgccaacggagacacagcccgcgctaccgttaacttccccgcaagtcgcaactacaatttccgcctgcggggttgcggcaacaacaataatcttgcccgtgtggacctgaggatcgacggacggaccgtcgggaccttttattaccagggcacatacccctgggaggccccaattgacaatgtttatgtcagtgcggggagtcatacagtcgaaatcactgttactgcggataacggcacatgggacgtgtatgccgactacctggtgatacagtgactcgagggggggcccggtacccaattcgccctatagtgagtcgtattacaattcactggccgtcgttttacaacgtcgtgactgggaaaaccctggcgttacccaacttaatcgccttgcagcacatccccctttcgccagctggcgtaatagcgaagaggcccgcaccgatcgcccttcccaacagttgcgcagcctgaatggcgaatggaaattgtaagcgttaatattttgttaaaattcgcgttaaatttttgttaaatcagctcattttttaaccaataggccgaaatcggcaaaatcccttataaatcaaaagaatagaccgagatagggttgagtgttgttccagtttggaacaagagtccactattaaagaacgtggactccaacgtcaaagggcgaaaaaccgtctatcagggcgatggcccactacgtgaaccatcaccctaatcaagttttttggggtcgaggtgccgtaaagcactaaatcggaaccctaaagggagcccccgatttagagcttgacggggaaagccggcgaacgtggcgagaaaggaagggaagaaagcgaaaggagcgggcgctagggcgctggcaagtgtagcggtcacgctgcgcgtaaccaccacacccgccgcgcttaatgcgccgctacagggcgcgtcaggtg

SEQ ID NO: 3110 - DNA, 4958 bp, Artificial Sequence
  Synthetic Construct, AS-110 intein modified protein encoding nucleic acids in pBluescript
gcacttttcggggaaatgtgcgcggaacccctatttgtttatttttctaaatacattcaaatatgtatccgctcatgagacaataaccctgataaatgcttcaataatattgaaaaaggaagagtatgagtattcaacatttccgtgtcgcccttattcccttttttgcggcattttgccttcctgtttttgctcacccagaaacgctggtgaaagtaaaagatgctgaagatcagttgggtgcacgagtgggttacatcgaactggatctcaacagcggtaagatccttgagagttttcgccccgaagaacgttttccaatgatgagcacttttaaagttctgctatgtggcgcggtattatcccgtattgacgccgggcaagagcaactcggtcgccgcatacactattctcagaatgacttggttgagtactcaccagtcacagaaaagcatcttacggatggcatgacagtaagagaattatgcagtgctgccataaccatgagtgataacactgcggccaacttacttctgacaacgatcggaggaccgaaggagctaaccgcttttttgcacaacatgggggatcatgtaactcgccttgatcgttgggaaccggagctgaatgaagccataccaaacgacgagcgtgacaccacgatgcctgtagcaatggcaacaacgttgcgcaaactattaactggcgaactacttactctagcttcccggcaacaattaatagactggatggaggcggataaagttgcaggaccacttctgcgctcggcccttccggctggctggtttattgctgataaatctggagccggtgagcgtgggtctcgcggtatcattgcagcactggggccagatggtaagccctcccgtatcgtagttatctacacgacggggagtcaggcaactatggatgaacgaaatagacagatcgctgagataggtgcctcactgattaagcattggtaactgtcagaccaagtttactcatatatactttagattgatttaaaacttcatttttaatttaaaaggatctaggtgaagatcctttttgataatctcatgaccaaaatcccttaacgtgagttttcgttccactgagcgtcagaccccgtagaaaagatcaaaggatcttcttgagatcctttttttctgcgcgtaatctgctgcttgcaaacaaaaaaaccaccgctaccagcggtggtttgtttgccggatcaagagctaccaactctttttccgaaggtaactggcttcagcagagcgcagataccaaatactgtccttctagtgtagccgtagttaggccaccacttcaagaactctgtagcaccgcctacatacctcgctctgctaatcctgttaccagtggctgctgccagtggcgataagtcgtgtcttaccgggttggactcaagacgatagttaccggataaggcgcagcggtcgggctgaacggggggttcgtgcacacagcccagcttggagcgaacgacctacaccgaactgagatacctacagcgtgagctatgagaaagcgccacgcttcccgaagggagaaaggcggacaggtatccggtaagcggcagggtcggaacaggagagcgcacgagggagcttccagggggaaacgcctggtatctttatagtcctgtcgggtttcgccacctctgacttgagcgtcgatttttgtgatgctcgtcaggggggcggagcctatggaaaaacgccagcaacgcggcctttttacggttcctggccttttgctggccttttgctcacatgttctttcctgcgttatcccctgattctgtggataaccgtattaccgcctttgagtgagctgataccgctcgccgcagccgaacgaccgagcgcagcgagtcagtgagcgaggaagcggaagagcgcccaatacgcaaaccgcctctccccgcgcgttggccgattcattaatgcagctggcacgacaggtttcccgactggaaagcgggcagtgagcgcaacgcaattaatgtgagttagctcactcattaggcaccccaggctttacactttatgcttccggctcgtatgttgtgtggaattgtgagcggataacaatttcacacaggaaacagcatatgcaaacaagcattactctgacatccaacgcatccggtacgtttgacggttactattacgaactctggaaggatactggcaatacaacaatgacggtctacactcaaggtcgcttttcctgccagtggtcgaacatcaataacgcgttgtttaggaccgggaagaaatacaaccagaattggcagtctcttggcacaatccggatcacgtactctgcgacttacaacccaaacgggaactcctacttgtgtatctatggctggtctaccaacccattggtcgagttctacatcgttgagtcctgggggaactggagaccgcctggtgccacgtccctgggccaagtgacaatcgatggcgggacctacgacatctataggacgacacgcgtcaaccagccttgcgtggacggggacacactggtgctgacaaaggagttcgggctcatcaagatcaaggagctctacgagaagctggacggcaaggggcgcaagattgtggagggcaacgaggagtggaccgagctggagaagccaatcacggtctacggctacaaggacgggaagatcgttgagattaaggccacccacgtttacaagggcgtgtccagcgggatggtcgagatcaggacccggacgggccggaagatcaaggtgacgccgattcaccgcctgttcacaggcagggtcactaaggacgggctgatcctcaaggaggtcatggctatgcatgttaagcccggcgataggatcgccgtggtcaagaagattgacggcggggagtacatcaagctcgattcgtctaacgtgggcgagatcaaggtcccggagattctcaatgaggagctggcggagttcctcggctacctgatggctaacggcacactgaagtcggggatcattgagatctactgcgacgatgagtctctcctggagagggtgaactccctgtccctcaagctgttcggcgtcggcgggcggattgtccagaaggttgacgggaaggcgctcgtgatccagagcaagccactggtcgacgttctcaggaggctgggcgtccctgaggataagaaggttgagaactggaaggtgccgcgggagctcctgctcagcccatcgaacgttgtgcgcgccttcgttaatgcgtacattaagggcaaggaggaggtcgagatcaccctcgcttccgaggagggggcttacgagctcagctacctgttcgctaagctgggcatctacgtgacaatttctaagtcaggggagtactacaaggtgcgcgtctcgcggaggggcaacctcgacactatcccagttgaagtgaatgggatgccaaaggtgctgccttacgaggatttcaggaagttcgccaagtccatcggcctggaggaggtcgcggagaatcacctgcagcatatcattttcgacgaggtcatcgatgtcaggtacattccggagccccaggaggtgtacgatgttactacagagactcataatttcgtggggggcaacatgccaactctgctccacaattccattgtggggacagccacgttcgatcagtactggagcgtgcgcacctctaagcggacttcaggaacagtgaccgtgaccgatcacttccgcgcctgggcgaaccggggcctgaacctcggcacaatagaccaaattacattgtgcgtggagggttaccaaagctctggatcagccaacatcacccagaacaccttctctcagggctcttcttccggcagttcgggtggctcatccggctccacaacgactactcgcatcgagtgtgagaacatgtccttgtccggaccctacgttagcaggatcaccaatccctttaatggtattgcgctgtacgccaacggagacacagcccgcgctaccgttaacttccccgcaagtcgcaactacaatttccgcctgcggggttgcggcaacaacaataatcttgcccgtgtggacctgaggatcgacggacggaccgtcgggaccttttattaccagggcacatacccctgggaggccccaattgacaatgtttatgtcagtgcggggagtcatacagtcgaaatcactgttactgcggataacggcacatgggacgtgtatgccgactacctggtgatacagtgactcgagggggggcccggtacccaattcgccctatagtgagtcgtattacaattcactggccgtcgttttacaacgtcgtgactgggaaaaccctggcgttacccaacttaatcgccttgcagcacatccccctttcgccagctggcgtaatagcgaagaggcccgcaccgatcgcccttcccaacagttgcgcagcctgaatggcgaatggaaattgtaagcgttaatattttgttaaaattcgcgttaaatttttgttaaatcagctcattttttaaccaataggccgaaatcggcaaaatcccttataaatcaaaagaatagaccgagatagggttgagtgttgttccagtttggaacaagagtccactattaaagaacgtggactccaacgtcaaagggcgaaaaaccgtctatcagggcgatggcccactacgtgaaccatcaccctaatcaagttttttggggtcgaggtgccgtaaagcactaaatcggaaccctaaagggagcccccgatttagagcttgacggggaaagccggcgaacgtggcgagaaaggaagggaagaaagcgaaaggagcgggcgctagggcgctggcaagtgtagcggtcacgctgcgcgtaaccaccacacccgccgcgcttaatgcgccgctacagggcgcgtcaggtg

SEQ ID NO: 3111 - DNA, 4952 bp, Artificial Sequence
  Synthetic Construct, AS-111 intein modified protein encoding nucleic acids in pBluescript
gcacttttcggggaaatgtgcgcggaacccctatttgtttatttttctaaatacattcaaatatgtatccgctcatgagacaataaccctgataaatgcttcaataatattgaaaaaggaagagtatgagtattcaacatttccgtgtcgcccttattcccttttttgcggcattttgccttcctgtttttgctcacccagaaacgctggtgaaagtaaaagatgctgaagatcagttgggtgcacgagtgggttacatcgaactggatctcaacagcggtaagatccttgagagttttcgccccgaagaacgttttccaatgatgagcacttttaaagttctgctatgtggcgcggtattatcccgtattgacgccgggcaagagcaactcggtcgccgcatacactattctcagaatgacttggttgagtactcaccagtcacagaaaagcatcttacggatggcatgacagtaagagaattatgcagtgctgccataaccatgagtgataacactgcggccaacttacttctgacaacgatcggaggaccgaaggagctaaccgcttttttgcacaacatgggggatcatgtaactcgccttgatcgttgggaaccggagctgaatgaagccataccaaacgacgagcgtgacaccacgatgcctgtagcaatggcaacaacgttgcgcaaactattaactggcgaactacttactctagcttcccggcaacaattaatagactggatggaggcggataaagttgcaggaccacttctgcgctcggcccttccggctggctggtttattgctgataaatctggagccggtgagcgtgggtctcgcggtatcattgcagcactggggccagatggtaagccctcccgtatcgtagttatctacacgacggggagtcaggcaactatggatgaacgaaatagacagatcgctgagataggtgcctcactgattaagcattggtaactgtcagaccaagtttactcatatatactttagattgatttaaaacttcatttttaatttaaaaggatctaggtgaagatcctttttgataatctcatgaccaaaatcccttaacgtgagttttcgttccactgagcgtcagaccccgtagaaaagatcaaaggatcttcttgagatcctttttttctgcgcgtaatctgctgcttgcaaacaaaaaaaccaccgctaccagcggtggtttgtttgccggatcaagagctaccaactctttttccgaaggtaactggcttcagcagagcgcagataccaaatactgtccttctagtgtagccgtagttaggccaccacttcaagaactctgtagcaccgcctacatacctcgctctgctaatcctgttaccagtggctgctgccagtggcgataagtcgtgtcttaccgggttggactcaagacgatagttaccggataaggcgcagcggtcgggctgaacggggggttcgtgcacacagcccagcttggagcgaacgacctacaccgaactgagatacctacagcgtgagctatgagaaagcgccacgcttcccgaagggagaaaggcggacaggtatccggtaagcggcagggtcggaacaggagagcgcacgagggagcttccagggggaaacgcctggtatctttatagtcctgtcgggtttcgccacctctgacttgagcgtcgatttttgtgatgctcgtcaggggggcggagcctatggaaaaacgccagcaacgcggcctttttacggttcctggccttttgctggccttttgctcacatgttctttcctgcgttatcccctgattctgtggataaccgtattaccgcctttgagtgagctgataccgctcgccgcagccgaacgaccgagcgcagcgagtcagtgagcgaggaagcggaagagcgcccaatacgcaaaccgcctctccccgcgcgttggccgattcattaatgcagctggcacgacaggtttcccgactggaaagcgggcagtgagcgcaacgcaattaatgtgagttagctcactcattaggcaccccaggctttacactttatgcttccggctcgtatgttgtgtggaattgtgagcggataacaatttcacacaggaaacagcatatgcaaacaagcattactctgacatccaacgcatccggtacgtttgacggttactattacgaactctggaaggatactggcaatacaacaatgacggtctacactcaaggtcgcttttcctgccagtggtcgaacatcaataacgcgttgtttaggaccgggaagaaatacaaccagaattggcagtctcttggcacaatccggatcacgtactctgcgacttacaacccaaacgggaactcctacttgtgtatctatggctggtctaccaacccattggtcgagttctacatcgttgagtcctgggggaactggagaccgcctggtgccacgtccctgggccaagtgacaatcgatggcgggacctacgacatctataggacgacacgcgtcaaccagccttgcgttaccgctgacacaaggctcgctacacagcatgggctggtccctatcgggtggctgcaggctaatgggggggctctggactgcacggtggacaggagggctctgggcgaggataggagggggacagttactcgcgccgctgtgccagcgttcctcagcgctggccaggctgaggtcttcaaggttaccacggccgagggctaccagatcaaggccacagcgtggcacgagttctacactgctaggggcaagctcaagctgtcggagctcaaggctggggacgagctgtgggtccagtccggcaaggggcagttcggcgctcagggcagcggggctctcggcctcctgatcgggctgattaccggcgacgggcatttcacgaaccgcggcaaggatgagcaggctgccgttatctccctgtggggcgaggagaggcagctcgctgacgatatcgccggctctgtcaatgccctcattgctgggacctcactggctccgcgcgactacctcgtgaagccagttgctgtggccgagcggaacatggtcttcattcgctcaaccatgctcgtcagggttctggatggctacgggttcaatggcgagacgaagctggaggtgccagaggtggtctggaggggctccgaggcttgcatgaggggctacctccaggggctgttccagacagacggcactgtgaacgtctccagcaattcccagagctgctcggtgcggctgtcgtcttcacaccgccctctcctgcaggatgttcaggtgctcctggcgaacttcggcgtcttctcgcgcatccatgagaggagggaggctggcccaaggtctctcccagacgggcagggcgggcagagggattacctgtgccagacacagcacgagctcatcgtggacggcgagtctcgcgaggcgttcatgagggagattgggttcctcctgcccgctaagcgggagaagtacgacgcttgggtcgccgataaggcgctcgttaagacccagaggttcgcggctaccatcacggcgattgagccagctggcgtggagcctgtctacgatactactcagccagacggcaacacagtcatcttcaatgggctcgttacggggcagtccattgtggggacagccacgttcgatcagtactggagcgtgcgcacctctaagcggacttcaggaacagtgaccgtgaccgatcacttccgcgcctgggcgaaccggggcctgaacctcggcacaatagaccaaattacattgtgcgtggagggttaccaaagctctggatcagccaacatcacccagaacaccttctctcagggctcttcttccggcagttcgggtggctcatccggctccacaacgactactcgcatcgagtgtgagaacatgtccttgtccggaccctacgttagcaggatcaccaatccctttaatggtattgcgctgtacgccaacggagacacagcccgcgctaccgttaacttccccgcaagtcgcaactacaatttccgcctgcggggttgcggcaacaacaataatcttgcccgtgtggacctgaggatcgacggacggaccgtcgggaccttttattaccagggcacatacccctgggaggccccaattgacaatgtttatgtcagtgcggggagtcatacagtcgaaatcactgttactgcggataacggcacatgggacgtgtatgccgactacctggtgatacagtgactcgagggggggcccggtacccaattcgccctatagtgagtcgtattacaattcactggccgtcgttttacaacgtcgtgactgggaaaaccctggcgttacccaacttaatcgccttgcagcacatccccctttcgccagctggcgtaatagcgaagaggcccgcaccgatcgcccttcccaacagttgcgcagcctgaatggcgaatggaaattgtaagcgttaatattttgttaaaattcgcgttaaatttttgttaaatcagctcattttttaaccaataggccgaaatcggcaaaatcccttataaatcaaaagaatagaccgagatagggttgagtgttgttccagtttggaacaagagtccactattaaagaacgtggactccaacgtcaaagggcgaaaaaccgtctatcagggcgatggcccactacgtgaaccatcaccctaatcaagttttttggggtcgaggtgccgtaaagcactaaatcggaaccctaaagggagcccccgatttagagcttgacggggaaagccggcgaacgtggcgagaaaggaagggaagaaagcgaaaggagcgggcgctagggcgctggcaagtgtagcggtcacgctgcgcgtaaccaccacacccgccgcgcttaatgcgccgctacagggcgcgtcaggtg

SEQ ID NO: 3112 - DNA, 5198 bp, Artificial Sequence
  Synthetic Construct, AS-112 intein modified protein encoding nucleic acids in pBluescript
gcacttttcggggaaatgtgcgcggaacccctatttgtttatttttctaaatacattcaaatatgtatccgctcatgagacaataaccctgataaatgcttcaataatattgaaaaaggaagagtatgagtattcaacatttccgtgtcgcccttattcccttttttgcggcattttgccttcctgtttttgctcacccagaaacgctggtgaaagtaaaagatgctgaagatcagttgggtgcacgagtgggttacatcgaactggatctcaacagcggtaagatccttgagagttttcgccccgaagaacgttttccaatgatgagcacttttaaagttctgctatgtggcgcggtattatcccgtattgacgccgggcaagagcaactcggtcgccgcatacactattctcagaatgacttggttgagtactcaccagtcacagaaaagcatcttacggatggcatgacagtaagagaattatgcagtgctgccataaccatgagtgataacactgcggccaacttacttctgacaacgatcggaggaccgaaggagctaaccgcttttttgcacaacatgggggatcatgtaactcgccttgatcgttgggaaccggagctgaatgaagccataccaaacgacgagcgtgacaccacgatgcctgtagcaatggcaacaacgttgcgcaaactattaactggcgaactacttactctagcttcccggcaacaattaatagactggatggaggcggataaagttgcaggaccacttctgcgctcggcccttccggctggctggtttattgctgataaatctggagccggtgagcgtgggtctcgcggtatcattgcagcactggggccagatggtaagccctcccgtatcgtagttatctacacgacggggagtcaggcaactatggatgaacgaaatagacagatcgctgagataggtgcctcactgattaagcattggtaactgtcagaccaagtttactcatatatactttagattgatttaaaacttcatttttaatttaaaaggatctaggtgaagatcctttttgataatctcatgaccaaaatcccttaacgtgagttttcgttccactgagcgtcagaccccgtagaaaagatcaaaggatcttcttgagatcctttttttctgcgcgtaatctgctgcttgcaaacaaaaaaaccaccgctaccagcggtggtttgtttgccggatcaagagctaccaactctttttccgaaggtaactggcttcagcagagcgcagataccaaatactgtccttctagtgtagccgtagttaggccaccacttcaagaactctgtagcaccgcctacatacctcgctctgctaatcctgttaccagtggctgctgccagtggcgataagtcgtgtcttaccgggttggactcaagacgatagttaccggataaggcgcagcggtcgggctgaacggggggttcgtgcacacagcccagcttggagcgaacgacctacaccgaactgagatacctacagcgtgagctatgagaaagcgccacgcttcccgaagggagaaaggcggacaggtatccggtaagcggcagggtcggaacaggagagcgcacgagggagcttccagggggaaacgcctggtatctttatagtcctgtcgggtttcgccacctctgacttgagcgtcgatttttgtgatgctcgtcaggggggcggagcctatggaaaaacgccagcaacgcggcctttttacggttcctggccttttgctggccttttgctcacatgttctttcctgcgttatcccctgattctgtggataaccgtattaccgcctttgagtgagctgataccgctcgccgcagccgaacgaccgagcgcagcgagtcagtgagcgaggaagcggaagagcgcccaatacgcaaaccgcctctccccgcgcgttggccgattcattaatgcagctggcacgacaggtttcccgactggaaagcgggcagtgagcgcaacgcaattaatgtgagttagctcactcattaggcaccccaggctttacactttatgcttccggctcgtatgttgtgtggaattgtgagcggataacaatttcacacaggaaacagcatatgcaaacaagcattactctgacatccaacgcatccggtacgtttgacggttactattacgaactctggaaggatactggcaatacaacaatgacggtctacactcaaggtcgcttttcctgccagtggtcgaacatcaataacgcgttgtttaggaccgggaagaaatacaaccagaattggcagtctcttggcacaatccggatcacgtactctgcgacttacaacccaaacgggaactcctacttgtgtatctatggctggtctaccaacccattggtcgagttctacatcgttgagtcctgggggaactggagaccgcctggtgccacgtccctgggccaagtgacaatcgatggcgggacctacgacatctataggacgacacgcgtcaaccagccttgcctctctgcggatcatgaggttctcacatctacagggtggaaggctctccccgctattaaggatgcggatcaggttatgacgctggacctccagacgggcacacagcagtggaactcggtgcaggctaccacgaggttcgcgcgggagggctcactctacaggctgaagtccgacgatatggatgcggtctgcaacgagtctcaccgctggtacctcaatactaaggaccagccaacaacttacaccgctttcaccacgcagcagatgctggataaccagctcgtggctctgcgcaactcctccggcaaggctacggaccagtggaaccacgagtccgggacaactacccacacgaaccataatatccctacagtcggccataacgggaatgttatgttcagctggccagactgcccatggctcccacgcgagttcgtcgctgatgaggcgtgcaacctcgactggtgcaggttcatcggcctcgtgatgggcgacgggtcgattgatcatgtcacggacgctcagggccaggagcactacagcatccagattcatcagagggctgggaacccagcttcgaacgctaatacagaggatgtcctggagaggctggctgctaagctgccaaatttcgtggtccacccatcctgcgttagcggcgcggaggagaagcatacttggaccatcaaccaccgggacatgtaccatttcttcctccccatgatgcgcggcccacagtcctacgaccctctggataacgccatgtgcaggacctaccaggctccagattaccaggccctctcgcggtctgacaatgagcctatcattccagtgccagctgactggaagaccggcaactggtggcacctgcgcaggtggatcaattacccatggctcttctcgctggcccagtctcaggcgagggctatgattaagggcatggctgccgcgaacggggattggtcactctccctgaaggctaggctggacaccggcgattctggggttgtgagggttttcagcaattcgatccccctcatgcacgacatgtcagtgctgggcctcctggccgatactcgcgtgaacattggcgtcgaccataagaaggggcagatgcagctccaggtccctgttaccatgccggcgctcctggcttggtgcatctctttctcattcgcgaactccgacctggctgtggctgctccaaagcctgaggcgtacgataatccgaggcacgacggcttcgtttactgcctcacggtgcccaacgggaatttcctggcccggcgcacagtcgagtacagcgataatgataagattcaggaggtcattgatgctgctcagaagcctttcttcacaggcaactccattgtggggacagccacgttcgatcagtactggagcgtgcgcacctctaagcggacttcaggaacagtgaccgtgaccgatcacttccgcgcctgggcgaaccggggcctgaacctcggcacaatagaccaaattacattgtgcgtggagggttaccaaagctctggatcagccaacatcacccagaacaccttctctcagggctcttcttccggcagttcgggtggctcatccggctccacaacgactactcgcatcgagtgtgagaacatgtccttgtccggaccctacgttagcaggatcaccaatccctttaatggtattgcgctgtacgccaacggagacacagcccgcgctaccgttaacttccccgcaagtcgcaactacaatttccgcctgcggggttgcggcaacaacaataatcttgcccgtgtggacctgaggatcgacggacggaccgtcgggaccttttattaccagggcacatacccctgggaggccccaattgacaatgtttatgtcagtgcggggagtcatacagtcgaaatcactgttactgcggataacggcacatgggacgtgtatgccgactacctggtgatacagtgactcgagggggggcccggtacccaattcgccctatagtgagtcgtattacaattcactggccgtcgttttacaacgtcgtgactgggaaaaccctggcgttacccaacttaatcgccttgcagcacatccccctttcgccagctggcgtaatagcgaagaggcccgcaccgatcgcccttcccaacagttgcgcagcctgaatggcgaatggaaattgtaagcgttaatattttgttaaaattcgcgttaaatttttgttaaatcagctcattttttaaccaataggccgaaatcggcaaaatcccttataaatcaaaagaatagaccgagatagggttgagtgttgttccagtttggaacaagagtccactattaaagaacgtggactccaacgtcaaagggcgaaaaaccgtctatcagggcgatggcccactacgtgaaccatcaccctaatcaagttttttggggtcgaggtgccgtaaagcactaaatcggaaccctaaagggagcccccgatttagagcttgacggggaaagccggcgaacgtggcgagaaaggaagggaagaaagcgaaaggagcgggcgctagggcgctggcaagtgtagcggtcacgctgcgcgtaaccaccacacccgccgcgcttaatgcgccgctacagggcgcgtcaggtg

SEQ ID NO: 3113 - DNA, 4970 bp, Artificial Sequence
  Synthetic Construct, AS-113 intein modified protein encoding nucleic acids in pBluescript
gcacttttcggggaaatgtgcgcggaacccctatttgtttatttttctaaatacattcaaatatgtatccgctcatgagacaataaccctgataaatgcttcaataatattgaaaaaggaagagtatgagtattcaacatttccgtgtcgcccttattcccttttttgcggcattttgccttcctgtttttgctcacccagaaacgctggtgaaagtaaaagatgctgaagatcagttgggtgcacgagtgggttacatcgaactggatctcaacagcggtaagatccttgagagttttcgccccgaagaacgttttccaatgatgagcacttttaaagttctgctatgtggcgcggtattatcccgtattgacgccgggcaagagcaactcggtcgccgcatacactattctcagaatgacttggttgagtactcaccagtcacagaaaagcatcttacggatggcatgacagtaagagaattatgcagtgctgccataaccatgagtgataacactgcggccaacttacttctgacaacgatcggaggaccgaaggagctaaccgcttttttgcacaacatgggggatcatgtaactcgccttgatcgttgggaaccggagctgaatgaagccataccaaacgacgagcgtgacaccacgatgcctgtagcaatggcaacaacgttgcgcaaactattaactggcgaactacttactctagcttcccggcaacaattaatagactggatggaggcggataaagttgcaggaccacttctgcgctcggcccttccggctggctggtttattgctgataaatctggagccggtgagcgtgggtctcgcggtatcattgcagcactggggccagatggtaagccctcccgtatcgtagttatctacacgacggggagtcaggcaactatggatgaacgaaatagacagatcgctgagataggtgcctcactgattaagcattggtaactgtcagaccaagtttactcatatatactttagattgatttaaaacttcatttttaatttaaaaggatctaggtgaagatcctttttgataatctcatgaccaaaatcccttaacgtgagttttcgttccactgagcgtcagaccccgtagaaaagatcaaaggatcttcttgagatcctttttttctgcgcgtaatctgctgcttgcaaacaaaaaaaccaccgctaccagcggtggtttgtttgccggatcaagagctaccaactctttttccgaaggtaactggcttcagcagagcgcagataccaaatactgtccttctagtgtagccgtagttaggccaccacttcaagaactctgtagcaccgcctacatacctcgctctgctaatcctgttaccagtggctgctgccagtggcgataagtcgtgtcttaccgggttggactcaagacgatagttaccggataaggcgcagcggtcgggctgaacggggggttcgtgcacacagcccagcttggagcgaacgacctacaccgaactgagatacctacagcgtgagctatgagaaagcgccacgcttcccgaagggagaaaggcggacaggtatccggtaagcggcagggtcggaacaggagagcgcacgagggagcttccagggggaaacgcctggtatctttatagtcctgtcgggtttcgccacctctgacttgagcgtcgatttttgtgatgctcgtcaggggggcggagcctatggaaaaacgccagcaacgcggcctttttacggttcctggccttttgctggccttttgctcacatgttctttcctgcgttatcccctgattctgtggataaccgtattaccgcctttgagtgagctgataccgctcgccgcagccgaacgaccgagcgcagcgagtcagtgagcgaggaagcggaagagcgcccaatacgcaaaccgcctctccccgcgcgttggccgattcattaatgcagctggcacgacaggtttcccgactggaaagcgggcagtgagcgcaacgcaattaatgtgagttagctcactcattaggcaccccaggctttacactttatgcttccggctcgtatgttgtgtggaattgtgagcggataacaatttcacacaggaaacagcatatgcaaacaagcattactctgacatccaacgcatccggtacgtttgacggttactattacgaactctggaaggatactggcaatacaacaatgacggtctacactcaaggtcgcttttcctgccagtggtcgaacatcaataacgcgttgtttaggaccgggaagaaatacaaccagaattggcagtctcttggcacaatccggatcacgtactctgcgacttacaacccaaacgggaactcctacttgtgtatctatggctggtctaccaacccattggtcgagttctacatcgttgagtcctgggggaactggagaccgcctggtgccacgtccctgggccaagtgacaatcgatggcgggacctacgacatctataggacgacacgcgtcaaccagccttgcgttactgcggatacatgggttatgactacggcggggccggctcaggtttcggagctgacggggcggtctttctcggctgtcgttgacggcaaggcctacgcggtgacatccgatgggttcttcaggactggccacaagccagtcctcgctctgaggaccagggagggccctgctctccgcctgacggctgaccatagggttcgcagggtggctaggaggaccaggtacacgctggaggctgagtggaccgaggctgggcagctgcagccaggcgacgagatcctcctgcacgatcatagggctctcggcgggtgggagggggctggcacacacgctgaggggtacctcctgggcctcctgatcggggacggcactctcaagtccgataaggctgtcattagcgtttgggctccagagctgaaggtggctggcgggggcgctgtcgcctacgcgcagaccggcgccgggggcatcgttcaggccgcggaggctgctgctgctacgctctcccacagggtcgacttccggggcttccagaggtcgatttctgggaggggcgaggctaggatggcttctggcgccgtgcggcacctggctcatgagatggggatgaggccaggccataagacaatcaccacggccatggagaaggcgtccagcgtcttcactgaggggctcctgaggggcctcttcgacgctgatgggagcgttcagggctcgcaggagaagggcgtgagcctcaggctgtcacagtccgatctctcgctcctgcagaccgctcagaggatgctcctgaggctgggcatcgcctccacgatctacccgaacaggcggctcgctcaggctaggccactgccagacggcagggggggcctgcgcgtctacgagacagcgtcacagcacgagctcgttatctccgctgataatctgaggatctacgccgagcggattgggttcgccgacacggataaggctgacaggctcgatcaggctctgggctcttacaaccggtcactcaatcgggagcgcttcacagtgactgtcgagtcgctgaccgaggagggctctgaggacgtgttcgatgttactgtggcggatattcatgctttcgatgctaacgggctctacgttcataactccattgtggggacagccacgttcgatcagtactggagcgtgcgcacctctaagcggacttcaggaacagtgaccgtgaccgatcacttccgcgcctgggcgaaccggggcctgaacctcggcacaatagaccaaattacattgtgcgtggagggttaccaaagctctggatcagccaacatcacccagaacaccttctctcagggctcttcttccggcagttcgggtggctcatccggctccacaacgactactcgcatcgagtgtgagaacatgtccttgtccggaccctacgttagcaggatcaccaatccctttaatggtattgcgctgtacgccaacggagacacagcccgcgctaccgttaacttccccgcaagtcgcaactacaatttccgcctgcggggttgcggcaacaacaataatcttgcccgtgtggacctgaggatcgacggacggaccgtcgggaccttttattaccagggcacatacccctgggaggccccaattgacaatgtttatgtcagtgcggggagtcatacagtcgaaatcactgttactgcggataacggcacatgggacgtgtatgccgactacctggtgatacagtgactcgagggggggcccggtacccaattcgccctatagtgagtcgtattacaattcactggccgtcgttttacaacgtcgtgactgggaaaaccctggcgttacccaacttaatcgccttgcagcacatccccctttcgccagctggcgtaatagcgaagaggcccgcaccgatcgcccttcccaacagttgcgcagcctgaatggcgaatggaaattgtaagcgttaatattttgttaaaattcgcgttaaatttttgttaaatcagctcattttttaaccaataggccgaaatcggcaaaatcccttataaatcaaaagaatagaccgagatagggttgagtgttgttccagtttggaacaagagtccactattaaagaacgtggactccaacgtcaaagggcgaaaaaccgtctatcagggcgatggcccactacgtgaaccatcaccctaatcaagttttttggggtcgaggtgccgtaaagcactaaatcggaaccctaaagggagcccccgatttagagcttgacggggaaagccggcgaacgtggcgagaaaggaagggaagaaagcgaaaggagcgggcgctagggcgctggcaagtgtagcggtcacgctgcgcgtaaccaccacacccgccgcgcttaatgcgccgctacagggcgcgtcaggtg

SEQ ID NO: 3114 - DNA, 4928 bp, Artificial Sequence
  Synthetic Construct, AS-114 intein modified protein encoding nucleic acids in pBluescript
gcacttttcggggaaatgtgcgcggaacccctatttgtttatttttctaaatacattcaaatatgtatccgctcatgagacaataaccctgataaatgcttcaataatattgaaaaaggaagagtatgagtattcaacatttccgtgtcgcccttattcccttttttgcggcattttgccttcctgtttttgctcacccagaaacgctggtgaaagtaaaagatgctgaagatcagttgggtgcacgagtgggttacatcgaactggatctcaacagcggtaagatccttgagagttttcgccccgaagaacgttttccaatgatgagcacttttaaagttctgctatgtggcgcggtattatcccgtattgacgccgggcaagagcaactcggtcgccgcatacactattctcagaatgacttggttgagtactcaccagtcacagaaaagcatcttacggatggcatgacagtaagagaattatgcagtgctgccataaccatgagtgataacactgcggccaacttacttctgacaacgatcggaggaccgaaggagctaaccgcttttttgcacaacatgggggatcatgtaactcgccttgatcgttgggaaccggagctgaatgaagccataccaaacgacgagcgtgacaccacgatgcctgtagcaatggcaacaacgttgcgcaaactattaactggcgaactacttactctagcttcccggcaacaattaatagactggatggaggcggataaagttgcaggaccacttctgcgctcggcccttccggctggctggtttattgctgataaatctggagccggtgagcgtgggtctcgcggtatcattgcagcactggggccagatggtaagccctcccgtatcgtagttatctacacgacggggagtcaggcaactatggatgaacgaaatagacagatcgctgagataggtgcctcactgattaagcattggtaactgtcagaccaagtttactcatatatactttagattgatttaaaacttcatttttaatttaaaaggatctaggtgaagatcctttttgataatctcatgaccaaaatcccttaacgtgagttttcgttccactgagcgtcagaccccgtagaaaagatcaaaggatcttcttgagatcctttttttctgcgcgtaatctgctgcttgcaaacaaaaaaaccaccgctaccagcggtggtttgtttgccggatcaagagctaccaactctttttccgaaggtaactggcttcagcagagcgcagataccaaatactgtccttctagtgtagccgtagttaggccaccacttcaagaactctgtagcaccgcctacatacctcgctctgctaatcctgttaccagtggctgctgccagtggcgataagtcgtgtcttaccgggttggactcaagacgatagttaccggataaggcgcagcggtcgggctgaacggggggttcgtgcacacagcccagcttggagcgaacgacctacaccgaactgagatacctacagcgtgagctatgagaaagcgccacgcttcccgaagggagaaaggcggacaggtatccggtaagcggcagggtcggaacaggagagcgcacgagggagcttccagggggaaacgcctggtatctttatagtcctgtcgggtttcgccacctctgacttgagcgtcgatttttgtgatgctcgtcaggggggcggagcctatggaaaaacgccagcaacgcggcctttttacggttcctggccttttgctggccttttgctcacatgttctttcctgcgttatcccctgattctgtggataaccgtattaccgcctttgagtgagctgataccgctcgccgcagccgaacgaccgagcgcagcgagtcagtgagcgaggaagcggaagagcgcccaatacgcaaaccgcctctccccgcgcgttggccgattcattaatgcagctggcacgacaggtttcccgactggaaagcgggcagtgagcgcaacgcaattaatgtgagttagctcactcattaggcaccccaggctttacactttatgcttccggctcgtatgttgtgtggaattgtgagcggataacaatttcacacaggaaacagcatatgcaaacaagcattactctgacatccaacgcatccggtacgtttgacggttactattacgaactctggaaggatactggcaatacaacaatgacggtctacactcaaggtcgcttttcctgccagtggtcgaacatcaataacgcgttgtttaggaccgggaagaaatacaaccagaattggcagtctcttggcacaatccggatcacgtactctgcgacttacaacccaaacgggaactcctacttgtgtatctatggctggtctaccaacccattggtcgagttctacatcgttgagtcctgggggaactggagaccgcctggtgccacgtccctgggccaagtgacaatcgatggcgggacctacgacatctataggacgacacgcgtcaaccagcctgcgggggttctctcgtcaaagattaagattcctgggggctggaagactatgggcaatattcgggtcggggatgaggtcgttacgccagacggcgggacagctaaggtcctcgctgttcacccacagggcgtgactaaggtggtcagggtccatttcaaggacggccggtacacagacgtctcgcccgatcacctctggaaggttcgcaggcaccattggtgcaacgataaggccatggcgaagctgactcgcgaggaggtggaggagagggtgtggagggtcatcaccacgaacgagctcaaggactacattggcctgagcacgaaggtttacgtgcagctcatcgagccggagaggaatgcggataagccattcaagattcacccttacgttctgggcgtgctcctgggcgacgggtgcatctcccagaaggctgtcgatattaccaagccataccagcagctcttcgacaaggtgcagagcctcctgcctgagcacctggagtgcgtctggaggccaaacaggaagggcgacggggagcccaagaccttcggcatccgcttcaaggatcggcgctccgagcagcacatcaattggcatattcgggacggcctgaaggagctcggcctgtacgggatgcgctcttggggcaaggtcatccccgaggagtacctccacgggtcagctaagcagaggctggagctcctgcagggcctcctggacaccgatgggacggttgataagcataagtcagtgtccttctccagctcgtctaagctcctgagcctcggcgtccagtacctcgttaggtcgctgggcgggatggctaggctgcaggagcgcacaccacactacactcataatggcgagaagagggaggggcggaccgactaccgggtctacatccgctacccgaggcccgaggagctcttcacgctggatcacaagagggagcgggcggtgtcccaccagcatacagagactctccgcctgcaggtcacccatatcgaggagaggcctgacgaggagacgcagtgcattactattgatcatccagatcatctctacattacggacgacttcatcgttactcacaactccattgtggggacagccacgttcgatcagtactggagcgtgcgcacctctaagcggacttcaggaacagtgaccgtgaccgatcacttccgcgcctgggcgaaccggggcctgaacctcggcacaatagaccaaattacattgtgcgtggagggttaccaaagctctggatcagccaacatcacccagaacaccttctctcagggctcttcttccggcagttcgggtggctcatccggctccacaacgactactcgcatcgagtgtgagaacatgtccttgtccggaccctacgttagcaggatcaccaatccctttaatggtattgcgctgtacgccaacggagacacagcccgcgctaccgttaacttccccgcaagtcgcaactacaatttccgcctgcggggttgcggcaacaacaataatcttgcccgtgtggacctgaggatcgacggacggaccgtcgggaccttttattaccagggcacatacccctgggaggccccaattgacaatgtttatgtcagtgcggggagtcatacagtcgaaatcactgttactgcggataacggcacatgggacgtgtatgccgactacctggtgatacagtgactcgagggggggcccggtacccaattcgccctatagtgagtcgtattacaattcactggccgtcgttttacaacgtcgtgactgggaaaaccctggcgttacccaacttaatcgccttgcagcacatccccctttcgccagctggcgtaatagcgaagaggcccgcaccgatcgcccttcccaacagttgcgcagcctgaatggcgaatggaaattgtaagcgttaatattttgttaaaattcgcgttaaatttttgttaaatcagctcattttttaaccaataggccgaaatcggcaaaatcccttataaatcaaaagaatagaccgagatagggttgagtgttgttccagtttggaacaagagtccactattaaagaacgtggactccaacgtcaaagggcgaaaaaccgtctatcagggcgatggcccactacgtgaaccatcaccctaatcaagttttttggggtcgaggtgccgtaaagcactaaatcggaaccctaaagggagcccccgatttagagcttgacggggaaagccggcgaacgtggcgagaaaggaagggaagaaagcgaaaggagcgggcgctagggcgctggcaagtgtagcggtcacgctgcgcgtaaccaccacacccgccgcgcttaatgcgccgctacagggcgcgtcaggtg

SEQ ID NO: 3115 - DNA, 5177 bp, Artificial Sequence
  Synthetic Construct, AS-115 intein modified protein encoding nucleic acids in pBluescript
gcacttttcggggaaatgtgcgcggaacccctatttgtttatttttctaaatacattcaaatatgtatccgctcatgagacaataaccctgataaatgcttcaataatattgaaaaaggaagagtatgagtattcaacatttccgtgtcgcccttattcccttttttgcggcattttgccttcctgtttttgctcacccagaaacgctggtgaaagtaaaagatgctgaagatcagttgggtgcacgagtgggttacatcgaactggatctcaacagcggtaagatccttgagagttttcgccccgaagaacgttttccaatgatgagcacttttaaagttctgctatgtggcgcggtattatcccgtattgacgccgggcaagagcaactcggtcgccgcatacactattctcagaatgacttggttgagtactcaccagtcacagaaaagcatcttacggatggcatgacagtaagagaattatgcagtgctgccataaccatgagtgataacactgcggccaacttacttctgacaacgatcggaggaccgaaggagctaaccgcttttttgcacaacatgggggatcatgtaactcgccttgatcgttgggaaccggagctgaatgaagccataccaaacgacgagcgtgacaccacgatgcctgtagcaatggcaacaacgttgcgcaaactattaactggcgaactacttactctagcttcccggcaacaattaatagactggatggaggcggataaagttgcaggaccacttctgcgctcggcccttccggctggctggtttattgctgataaatctggagccggtgagcgtgggtctcgcggtatcattgcagcactggggccagatggtaagccctcccgtatcgtagttatctacacgacggggagtcaggcaactatggatgaacgaaatagacagatcgctgagataggtgcctcactgattaagcattggtaactgtcagaccaagtttactcatatatactttagattgatttaaaacttcatttttaatttaaaaggatctaggtgaagatcctttttgataatctcatgaccaaaatcccttaacgtgagttttcgttccactgagcgtcagaccccgtagaaaagatcaaaggatcttcttgagatcctttttttctgcgcgtaatctgctgcttgcaaacaaaaaaaccaccgctaccagcggtggtttgtttgccggatcaagagctaccaactctttttccgaaggtaactggcttcagcagagcgcagataccaaatactgtccttctagtgtagccgtagttaggccaccacttcaagaactctgtagcaccgcctacatacctcgctctgctaatcctgttaccagtggctgctgccagtggcgataagtcgtgtcttaccgggttggactcaagacgatagttaccggataaggcgcagcggtcgggctgaacggggggttcgtgcacacagcccagcttggagcgaacgacctacaccgaactgagatacctacagcgtgagctatgagaaagcgccacgcttcccgaagggagaaaggcggacaggtatccggtaagcggcagggtcggaacaggagagcgcacgagggagcttccagggggaaacgcctggtatctttatagtcctgtcgggtttcgccacctctgacttgagcgtcgatttttgtgatgctcgtcaggggggcggagcctatggaaaaacgccagcaacgcggcctttttacggttcctggccttttgctggccttttgctcacatgttctttcctgcgttatcccctgattctgtggataaccgtattaccgcctttgagtgagctgataccgctcgccgcagccgaacgaccgagcgcagcgagtcagtgagcgaggaagcggaagagcgcccaatacgcaaaccgcctctccccgcgcgttggccgattcattaatgcagctggcacgacaggtttcccgactggaaagcgggcagtgagcgcaacgcaattaatgtgagttagctcactcattaggcaccccaggctttacactttatgcttccggctcgtatgttgtgtggaattgtgagcggataacaatttcacacaggaaacagcatatgcaaacaagcattactctgacatccaacgcatccggtacgtttgacggttactattacgaactctggaaggatactggcaatacaacaatgacggtctacactcaaggtcgcttttcctgccagtggtcgaacatcaataacgcgttgtttaggaccgggaagaaatacaaccagaattggcagtctcttggcacaatccggatcacgtactctgcgacttacaacccaaacgggaactcctacttgtgtatctatggctggtctaccaacccattggtcgagttctacatcgttgagtcctgggggaactggagaccgcctggtgccacgtccctgggccaagtgacaatcgatggcgggacctacgacatctataggacgacacgcgtcaaccagccttgcttcgctaaggggacaaaggttctcatggctaacggggatgacaagaatattgaggacatcgcggtcggggaggaggttctcgggaaggacggcctcccacgcgaggtggtcgctctgcctcgggggagggagacaatgtacgaggtcagcgagaagactcagcacagggcggagaccgttttcggcacggcctcgtacacatgcaacgcgactcacaagctcgtgctgcagaccaatcagagggttaacatcacgaatcatgtgctccggggcgagtctcagacctcagttacgtacttccagatgaagaccgctgtggctgacgggagggagattgagctcccaaagctgtgcacgaagtccttccagcactccagccatggccgggagaacgcttggaagaaggccgaggtcttcgcgtccacaatcagccgcgaccccattgattggactgcggaggctcgcgacatctctaggctcggctaccacgtgcgcagggctaccaggcagctctggagcccagttctggtggagaaggaggtcctggctcctatgatcgccaagcggggcttcgatgagtccattgcgccgtacatggcttacctcgtggggctgtgggtcggcgacgggtactccgatagggccacattcagcatcgacattcaggatgtggagatccacgagaggattaaggacttcgcctcacatgctggcctgactccaaggatcgcttgctacaagaagtccagggatgctaccatttcactccacaactccgagacgcggggcaagaatgtccgccagaacctgaatacggggaacctcctgtggtcgctcctggctgagatctgcggcaagaaggagaatgagatgctcttcaagctggtgccaagcttcctccgctcagagtccatcgcggtccgggagtacttcatttctggcctggtcgactcagatgggcacgttaagcgcgacgaggctgataagtgctacagcgccacagtgaagactatctaccctgccgtccgggacggcctcgtcagcgttgcgcgctcgctggggattcagacaagcgtgtcggtcgaggaggccaaggaggtcaactcggttaagcatcaggagtcttacgccatctacatggccaactcctccgctctcgactcggtgctgtctaagtgcgctgctccaaggaagcgggctgaggagcccgtttgcgtgaacagggagccgcacccctacacgttccacatggtcgagaaggaggaggacgatttctacggcatcactctctcagaggactcggatcatcagttcctgctctctaatctcgctctcgttcataattccattgtggggacagccacgttcgatcagtactggagcgtgcgcacctctaagcggacttcaggaacagtgaccgtgaccgatcacttccgcgcctgggcgaaccggggcctgaacctcggcacaatagaccaaattacattgtgcgtggagggttaccaaagctctggatcagccaacatcacccagaacaccttctctcagggctcttcttccggcagttcgggtggctcatccggctccacaacgactactcgcatcgagtgtgagaacatgtccttgtccggaccctacgttagcaggatcaccaatccctttaatggtattgcgctgtacgccaacggagacacagcccgcgctaccgttaacttccccgcaagtcgcaactacaatttccgcctgcggggttgcggcaacaacaataatcttgcccgtgtggacctgaggatcgacggacggaccgtcgggaccttttattaccagggcacatacccctgggaggccccaattgacaatgtttatgtcagtgcggggagtcatacagtcgaaatcactgttactgcggataacggcacatgggacgtgtatgccgactacctggtgatacagtgactcgagggggggcccggtacccaattcgccctatagtgagtcgtattacaattcactggccgtcgttttacaacgtcgtgactgggaaaaccctggcgttacccaacttaatcgccttgcagcacatccccctttcgccagctggcgtaatagcgaagaggcccgcaccgatcgcccttcccaacagttgcgcagcctgaatggcgaatggaaattgtaagcgttaatattttgttaaaattcgcgttaaatttttgttaaatcagctcattttttaaccaataggccgaaatcggcaaaatcccttataaatcaaaagaatagaccgagatagggttgagtgttgttccagtttggaacaagagtccactattaaagaacgtggactccaacgtcaaagggcgaaaaaccgtctatcagggcgatggcccactacgtgaaccatcaccctaatcaagttttttggggtcgaggtgccgtaaagcactaaatcggaaccctaaagggagcccccgatttagagcttgacggggaaagccggcgaacgtggcgagaaaggaagggaagaaagcgaaaggagcgggcgctagggcgctggcaagtgtagcggtcacgctgcgcgtaaccaccacacccgccgcgcttaatgcgccgctacagggcgcgtcaggtg

SEQ ID NO: 3116 - DNA, 5114 bp, Artificial Sequence
  Synthetic Construct, AS-116 intein modified protein encoding nucleic acids in pBluescript
gcacttttcggggaaatgtgcgcggaacccctatttgtttatttttctaaatacattcaaatatgtatccgctcatgagacaataaccctgataaatgcttcaataatattgaaaaaggaagagtatgagtattcaacatttccgtgtcgcccttattcccttttttgcggcattttgccttcctgtttttgctcacccagaaacgctggtgaaagtaaaagatgctgaagatcagttgggtgcacgagtgggttacatcgaactggatctcaacagcggtaagatccttgagagttttcgccccgaagaacgttttccaatgatgagcacttttaaagttctgctatgtggcgcggtattatcccgtattgacgccgggcaagagcaactcggtcgccgcatacactattctcagaatgacttggttgagtactcaccagtcacagaaaagcatcttacggatggcatgacagtaagagaattatgcagtgctgccataaccatgagtgataacactgcggccaacttacttctgacaacgatcggaggaccgaaggagctaaccgcttttttgcacaacatgggggatcatgtaactcgccttgatcgttgggaaccggagctgaatgaagccataccaaacgacgagcgtgacaccacgatgcctgtagcaatggcaacaacgttgcgcaaactattaactggcgaactacttactctagcttcccggcaacaattaatagactggatggaggcggataaagttgcaggaccacttctgcgctcggcccttccggctggctggtttattgctgataaatctggagccggtgagcgtgggtctcgcggtatcattgcagcactggggccagatggtaagccctcccgtatcgtagttatctacacgacggggagtcaggcaactatggatgaacgaaatagacagatcgctgagataggtgcctcactgattaagcattggtaactgtcagaccaagtttactcatatatactttagattgatttaaaacttcatttttaatttaaaaggatctaggtgaagatcctttttgataatctcatgaccaaaatcccttaacgtgagttttcgttccactgagcgtcagaccccgtagaaaagatcaaaggatcttcttgagatcctttttttctgcgcgtaatctgctgcttgcaaacaaaaaaaccaccgctaccagcggtggtttgtttgccggatcaagagctaccaactctttttccgaaggtaactggcttcagcagagcgcagataccaaatactgtccttctagtgtagccgtagttaggccaccacttcaagaactctgtagcaccgcctacatacctcgctctgctaatcctgttaccagtggctgctgccagtggcgataagtcgtgtcttaccgggttggactcaagacgatagttaccggataaggcgcagcggtcgggctgaacggggggttcgtgcacacagcccagcttggagcgaacgacctacaccgaactgagatacctacagcgtgagctatgagaaagcgccacgcttcccgaagggagaaaggcggacaggtatccggtaagcggcagggtcggaacaggagagcgcacgagggagcttccagggggaaacgcctggtatctttatagtcctgtcgggtttcgccacctctgacttgagcgtcgatttttgtgatgctcgtcaggggggcggagcctatggaaaaacgccagcaacgcggcctttttacggttcctggccttttgctggccttttgctcacatgttctttcctgcgttatcccctgattctgtggataaccgtattaccgcctttgagtgagctgataccgctcgccgcagccgaacgaccgagcgcagcgagtcagtgagcgaggaagcggaagagcgcccaatacgcaaaccgcctctccccgcgcgttggccgattcattaatgcagctggcacgacaggtttcccgactggaaagcgggcagtgagcgcaacgcaattaatgtgagttagctcactcattaggcaccccaggctttacactttatgcttccggctcgtatgttgtgtggaattgtgagcggataacaatttcacacaggaaacagcatatgcaaacaagcattactctgacatccaacgcatccggtacgtttgacggttactattacgaactctggaaggatactggcaatacaacaatgacggtctacactcaaggtcgcttttcctgccagtggtcgaacatcaataacgcgttgtttaggaccgggaagaaatacaaccagaattggcagtctcttggcacaatccggatcacgtactctgcgacttacaacccaaacgggaactcctacttgtgtatctatggctggtctaccaacccattggtcgagttctacatcgttgagtcctgggggaactggagaccgcctggtgccacgtccctgggccaagtgacaatcgatggcgggacctacgacatctataggacgacacgcgtcaaccagccttgcctcgcgggggacactctcattacactggctgacgggcggcgggttcctattcgggagctggtctcgcagcagaatttctcggtctgggcgctgaacccgcagacgtacaggctggagagggctcgggtctcccgggccttctgcacaggcatcaagcccgtttacaggctgaccacgaggctcgggaggagcattagggctactgctaatcaccgcttcctgaccccacagggctggaagagggtggacgagctccagcctggggattacctggctctcccaaggaggatccccacggccagcacaccaactctgaccgaggctgagctcgctctcctgggccacctgatcggcgacgggtgcactctccctcaccatgtgattcagtacacctctagggacgctgatctggctacgctcgtcgctcatctggccacaaaggtcttcggctcaaaggttaccccgcagatccgcaaggagctcaggtggtaccaggtgtacctgagggctgctaggccactcgctcctggcaagcgcaacccgatcagcgactggctgagggatctcggcattttcgggctgcggtcgtacgagaagaaggtccccgcgctcctgttctgccagacgtccgaggccatcgcgacattcctgaggcacctctgggctactgacggctgcattcagatgaggagggggaagaagccatacccagctgtgtactacgcgacctccagctaccagctcgcgagggatgtccagtcgctcctgctccgcctgggcatcaacgccaggctcaagaccgttgctcagggcgagaaggggagggtgcagtaccatgtgaaggtctccggcagggaggacctgctcaggttcgtggagaagattggcgctgtcggggctaggcagagggctgctctggcctcggtttacgactacctctctgtgcggacgggcaacccaaatcgcgatatcattcctgtggctctgtggtacgagctcgtccgcgaggccatgtaccagaggggcatctcgcaccggcagctgcatgcgaacctcgggatggcttacggcgggatgacactgttccggcagaatctctctcgggctcgcgccctgaggctcgctgaggctgctgcctgcccagagctgaggcagctcgctcagtcagacgtctactgggatccgatcgtttccattgagcccgacggcgttgaggaggtgttcgatctcactgttccagggccacataacttcgttgctaatgacatcattgctcataattccattgtggggacagccacgttcgatcagtactggagcgtgcgcacctctaagcggacttcaggaacagtgaccgtgaccgatcacttccgcgcctgggcgaaccggggcctgaacctcggcacaatagaccaaattacattgtgcgtggagggttaccaaagctctggatcagccaacatcacccagaacaccttctctcagggctcttcttccggcagttcgggtggctcatccggctccacaacgactactcgcatcgagtgtgagaacatgtccttgtccggaccctacgttagcaggatcaccaatccctttaatggtattgcgctgtacgccaacggagacacagcccgcgctaccgttaacttccccgcaagtcgcaactacaatttccgcctgcggggttgcggcaacaacaataatcttgcccgtgtggacctgaggatcgacggacggaccgtcgggaccttttattaccagggcacatacccctgggaggccccaattgacaatgtttatgtcagtgcggggagtcatacagtcgaaatcactgttactgcggataacggcacatgggacgtgtatgccgactacctggtgatacagtgactcgagggggggcccggtacccaattcgccctatagtgagtcgtattacaattcactggccgtcgttttacaacgtcgtgactgggaaaaccctggcgttacccaacttaatcgccttgcagcacatccccctttcgccagctggcgtaatagcgaagaggcccgcaccgatcgcccttcccaacagttgcgcagcctgaatggcgaatggaaattgtaagcgttaatattttgttaaaattcgcgttaaatttttgttaaatcagctcattttttaaccaataggccgaaatcggcaaaatcccttataaatcaaaagaatagaccgagatagggttgagtgttgttccagtttggaacaagagtccactattaaagaacgtggactccaacgtcaaagggcgaaaaaccgtctatcagggcgatggcccactacgtgaaccatcaccctaatcaagttttttggggtcgaggtgccgtaaagcactaaatcggaaccctaaagggagcccccgatttagagcttgacggggaaagccggcgaacgtggcgagaaaggaagggaagaaagcgaaaggagcgggcgctagggcgctggcaagtgtagcggtcacgctgcgcgtaaccaccacacccgccgcgcttaatgcgccgctacagggcgcgtcaggtg

SEQ ID NO: 3117 - DNA, 4946 bp, Artificial Sequence
  Synthetic Construct, AS-117 intein modified protein encoding nucleic acids in pBluescript
gcacttttcggggaaatgtgcgcggaacccctatttgtttatttttctaaatacattcaaatatgtatccgctcatgagacaataaccctgataaatgcttcaataatattgaaaaaggaagagtatgagtattcaacatttccgtgtcgcccttattcccttttttgcggcattttgccttcctgtttttgctcacccagaaacgctggtgaaagtaaaagatgctgaagatcagttgggtgcacgagtgggttacatcgaactggatctcaacagcggtaagatccttgagagttttcgccccgaagaacgttttccaatgatgagcacttttaaagttctgctatgtggcgcggtattatcccgtattgacgccgggcaagagcaactcggtcgccgcatacactattctcagaatgacttggttgagtactcaccagtcacagaaaagcatcttacggatggcatgacagtaagagaattatgcagtgctgccataaccatgagtgataacactgcggccaacttacttctgacaacgatcggaggaccgaaggagctaaccgcttttttgcacaacatgggggatcatgtaactcgccttgatcgttgggaaccggagctgaatgaagccataccaaacgacgagcgtgacaccacgatgcctgtagcaatggcaacaacgttgcgcaaactattaactggcgaactacttactctagcttcccggcaacaattaatagactggatggaggcggataaagttgcaggaccacttctgcgctcggcccttccggctggctggtttattgctgataaatctggagccggtgagcgtgggtctcgcggtatcattgcagcactggggccagatggtaagccctcccgtatcgtagttatctacacgacggggagtcaggcaactatggatgaacgaaatagacagatcgctgagataggtgcctcactgattaagcattggtaactgtcagaccaagtttactcatatatactttagattgatttaaaacttcatttttaatttaaaaggatctaggtgaagatcctttttgataatctcatgaccaaaatcccttaacgtgagttttcgttccactgagcgtcagaccccgtagaaaagatcaaaggatcttcttgagatcctttttttctgcgcgtaatctgctgcttgcaaacaaaaaaaccaccgctaccagcggtggtttgtttgccggatcaagagctaccaactctttttccgaaggtaactggcttcagcagagcgcagataccaaatactgtccttctagtgtagccgtagttaggccaccacttcaagaactctgtagcaccgcctacatacctcgctctgctaatcctgttaccagtggctgctgccagtggcgataagtcgtgtcttaccgggttggactcaagacgatagttaccggataaggcgcagcggtcgggctgaacggggggttcgtgcacacagcccagcttggagcgaacgacctacaccgaactgagatacctacagcgtgagctatgagaaagcgccacgcttcccgaagggagaaaggcggacaggtatccggtaagcggcagggtcggaacaggagagcgcacgagggagcttccagggggaaacgcctggtatctttatagtcctgtcgggtttcgccacctctgacttgagcgtcgatttttgtgatgctcgtcaggggggcggagcctatggaaaaacgccagcaacgcggcctttttacggttcctggccttttgctggccttttgctcacatgttctttcctgcgttatcccctgattctgtggataaccgtattaccgcctttgagtgagctgataccgctcgccgcagccgaacgaccgagcgcagcgagtcagtgagcgaggaagcggaagagcgcccaatacgcaaaccgcctctccccgcgcgttggccgattcattaatgcagctggcacgacaggtttcccgactggaaagcgggcagtgagcgcaacgcaattaatgtgagttagctcactcattaggcaccccaggctttacactttatgcttccggctcgtatgttgtgtggaattgtgagcggataacaatttcacacaggaaacagcatatgcaaacaagcattactctgacatccaacgcatccggtacgtttgacggttactattacgaactctggaaggatactggcaatacaacaatgacggtctacactcaaggtcgcttttcctgccagtggtcgaacatcaataacgcgttgtttaggaccgggaagaaatacaaccagaattggcagtctcttggcacaatccggatcacgtactctgcgacttacaacccaaacgggaactcctacttgtgtatctatggctggtctaccaacccattggtcgagttctacatcgttgagtcctgggggaactggagaccgcctggtgccacgtccctgggccaagtgacaatcgatggcgggacctacgacatctataggacgacacgcgtcaaccagccttgcgttacggcggagacatgggttatgacggatgagggggctaggcaggtctcggctctgctggatcggcctttcagggcggtcgtgaacggcatcgcctacgattcaggcgagcacgggttcttctgcaccggcctcaagccagtgaagaggctgtccaccgcttgcgggaggcacctcaggctgacggctgaccatctggtccggaaggtggtcggcaagacgaggtggaggcaggaggttgagtgggtgccagctggcgacctcaggcctggggatgaggtgaagctgcacgaccatcgcaccgcgatgattcagacgaggcctgaggatgagaggggctacctcctggggctcctgatcggcgacggggttattcgcgacgataagacactcatctccgtgtggccacaggaggagtgcattggcgctcagccactggggcaccccgtcatgcataaggttgaggctctcctgagggacctcccacacagggctgatttcgctggctggcagaaggtcgagggcaggggggagtacaggatcggcacagctgctctcactgctctggctgctgagtacggcctcacacgcgggaggaagaccatcacgccggagattgagggcgctgagactgctggcttcggggctgctgtcctcaggggcctgttcgacgctgatggcagcgttcagggggctcaggagaagggcgtgtccgtcaggctcgctcagagcgacctggctctcctgcaggctgctcagaggatgctcgctaggctgggcatgaacgctgtgatctacgagaatcgcagggaggcgggcagggctttcctgccagacgggaagggcgggcaggctcacttcgagaccaaggcgcagcatgagctcgtcatctcgggcgagaacctggcgacataccaggagcggattgggttcactgatgtggctaaggctaggaggctcgctgtcgctctgtcgggctacaagagggccctcaatcgggagcgcttctctgccgttgtggcggacgtcgttgacgatggcatggcggaggtgttcgatgttcaggttccaggggttaatgctttcgatgctaatggcttctacgttcacaactccattgtggggacagccacgttcgatcagtactggagcgtgcgcacctctaagcggacttcaggaacagtgaccgtgaccgatcacttccgcgcctgggcgaaccggggcctgaacctcggcacaatagaccaaattacattgtgcgtggagggttaccaaagctctggatcagccaacatcacccagaacaccttctctcagggctcttcttccggcagttcgggtggctcatccggctccacaacgactactcgcatcgagtgtgagaacatgtccttgtccggaccctacgttagcaggatcaccaatccctttaatggtattgcgctgtacgccaacggagacacagcccgcgctaccgttaacttccccgcaagtcgcaactacaatttccgcctgcggggttgcggcaacaacaataatcttgcccgtgtggacctgaggatcgacggacggaccgtcgggaccttttattaccagggcacatacccctgggaggccccaattgacaatgtttatgtcagtgcggggagtcatacagtcgaaatcactgttactgcggataacggcacatgggacgtgtatgccgactacctggtgatacagtgactcgagggggggcccggtacccaattcgccctatagtgagtcgtattacaattcactggccgtcgttttacaacgtcgtgactgggaaaaccctggcgttacccaacttaatcgccttgcagcacatccccctttcgccagctggcgtaatagcgaagaggcccgcaccgatcgcccttcccaacagttgcgcagcctgaatggcgaatggaaattgtaagcgttaatattttgttaaaattcgcgttaaatttttgttaaatcagctcattttttaaccaataggccgaaatcggcaaaatcccttataaatcaaaagaatagaccgagatagggttgagtgttgttccagtttggaacaagagtccactattaaagaacgtggactccaacgtcaaagggcgaaaaaccgtctatcagggcgatggcccactacgtgaaccatcaccctaatcaagttttttggggtcgaggtgccgtaaagcactaaatcggaaccctaaagggagcccccgatttagagcttgacggggaaagccggcgaacgtggcgagaaaggaagggaagaaagcgaaaggagcgggcgctagggcgctggcaagtgtagcggtcacgctgcgcgtaaccaccacacccgccgcgcttaatgcgccgctacagggcgcgtcaggtg

SEQ ID NO: 3118 - DNA, 4874 bp, Artificial Sequence
  Synthetic Construct, AS-118 intein modified protein encoding nucleic acids in pBluescript
gcacttttcggggaaatgtgcgcggaacccctatttgtttatttttctaaatacattcaaatatgtatccgctcatgagacaataaccctgataaatgcttcaataatattgaaaaaggaagagtatgagtattcaacatttccgtgtcgcccttattcccttttttgcggcattttgccttcctgtttttgctcacccagaaacgctggtgaaagtaaaagatgctgaagatcagttgggtgcacgagtgggttacatcgaactggatctcaacagcggtaagatccttgagagttttcgccccgaagaacgttttccaatgatgagcacttttaaagttctgctatgtggcgcggtattatcccgtattgacgccgggcaagagcaactcggtcgccgcatacactattctcagaatgacttggttgagtactcaccagtcacagaaaagcatcttacggatggcatgacagtaagagaattatgcagtgctgccataaccatgagtgataacactgcggccaacttacttctgacaacgatcggaggaccgaaggagctaaccgcttttttgcacaacatgggggatcatgtaactcgccttgatcgttgggaaccggagctgaatgaagccataccaaacgacgagcgtgacaccacgatgcctgtagcaatggcaacaacgttgcgcaaactattaactggcgaactacttactctagcttcccggcaacaattaatagactggatggaggcggataaagttgcaggaccacttctgcgctcggcccttccggctggctggtttattgctgataaatctggagccggtgagcgtgggtctcgcggtatcattgcagcactggggccagatggtaagccctcccgtatcgtagttatctacacgacggggagtcaggcaactatggatgaacgaaatagacagatcgctgagataggtgcctcactgattaagcattggtaactgtcagaccaagtttactcatatatactttagattgatttaaaacttcatttttaatttaaaaggatctaggtgaagatcctttttgataatctcatgaccaaaatcccttaacgtgagttttcgttccactgagcgtcagaccccgtagaaaagatcaaaggatcttcttgagatcctttttttctgcgcgtaatctgctgcttgcaaacaaaaaaaccaccgctaccagcggtggtttgtttgccggatcaagagctaccaactctttttccgaaggtaactggcttcagcagagcgcagataccaaatactgtccttctagtgtagccgtagttaggccaccacttcaagaactctgtagcaccgcctacatacctcgctctgctaatcctgttaccagtggctgctgccagtggcgataagtcgtgtcttaccgggttggactcaagacgatagttaccggataaggcgcagcggtcgggctgaacggggggttcgtgcacacagcccagcttggagcgaacgacctacaccgaactgagatacctacagcgtgagctatgagaaagcgccacgcttcccgaagggagaaaggcggacaggtatccggtaagcggcagggtcggaacaggagagcgcacgagggagcttccagggggaaacgcctggtatctttatagtcctgtcgggtttcgccacctctgacttgagcgtcgatttttgtgatgctcgtcaggggggcggagcctatggaaaaacgccagcaacgcggcctttttacggttcctggccttttgctggccttttgctcacatgttctttcctgcgttatcccctgattctgtggataaccgtattaccgcctttgagtgagctgataccgctcgccgcagccgaacgaccgagcgcagcgagtcagtgagcgaggaagcggaagagcgcccaatacgcaaaccgcctctccccgcgcgttggccgattcattaatgcagctggcacgacaggtttcccgactggaaagcgggcagtgagcgcaacgcaattaatgtgagttagctcactcattaggcaccccaggctttacactttatgcttccggctcgtatgttgtgtggaattgtgagcggataacaatttcacacaggaaacagcatatgcaaacaagcattactctgacatccaacgcatccggtacgtttgacggttactattacgaactctggaaggatactggcaatacaacaatgacggtctacactcaaggtcgcttttcctgccagtggtcgaacatcaataacgcgttgtttaggaccgggaagaaatacaaccagaattggcagtctcttggcacaatccggatcacgtactctgcgacttacaacccaaacgggaactcctacttgtgtatctatggctggtctaccaacccattggtcgagttctacatcgttgagtcctgggggaactggagaccgcctggtgccacgtccctgggccaagtgacaatcgatggcgggacctacgacatctataggacgacacgcgtcaaccagccttgcctcaagcgggggacagaggtcattatgttcgatgggacaactaagaaggtggaggacgttatcgtgggggacgttctcatggggccagacagcacccctaggaacgtgctctcgctgggcagggggagggagatgatgtacgaggtgaagccacggaagggcgagtcctacacggtcaatgagtcacacatcctctccctgcgcaccacgacaggcattgcgaaggggtcctggcctgacaacacagtcttcgatatcagcgttcgggactggctcaagctgccaaagtatgtgactggccctaatgggtacctcaagggctggagggtgccagtcgatttcccaaggaaggagcaggacgaggctctcctgccaccatacctgatgggcctctggctgggcgacgggacttccagctcgggcgctatcacctcgggggagaatgagaaggagattagggcttacctggagtcttacgctgctaggaacggcatgcagatcaggaaggaggggctgacttggtctatttcacacggcaacaccgggcacaagaagcatggcttcacgcatgcgctcaagagcgctggggtgctgaacaataagcacatcccgcataactacaagtgcggcgataggaggcagaggctggagctcctggctggcctcctggactctgatgggtactgcgatctctcaaaggctggcttcgactggatttccgttagcgagaggctggccgacgatttctgctacctctgccggtcgctgggcttcgctgcctacaagaagaagacctgcaagcgctgcgcgaacacagacgtctggggcgattacttcagggtttcggtgtctggggacttctccgaggtgccattcgtcaggggcaggcatcagaatctccccaagcgcaacatcaataagaacgttctgaacgtgggcatcgagtccattacccccgtcggcgttgacgattacttcgggttcacaattgatggggattcaaggttcctcctcggggatttcacagttactcataatacctccattgtggggacagccacgttcgatcagtactggagcgtgcgcacctctaagcggacttcaggaacagtgaccgtgaccgatcacttccgcgcctgggcgaaccggggcctgaacctcggcacaatagaccaaattacattgtgcgtggagggttaccaaagctctggatcagccaacatcacccagaacaccttctctcagggctcttcttccggcagttcgggtggctcatccggctccacaacgactactcgcatcgagtgtgagaacatgtccttgtccggaccctacgttagcaggatcaccaatccctttaatggtattgcgctgtacgccaacggagacacagcccgcgctaccgttaacttccccgcaagtcgcaactacaatttccgcctgcggggttgcggcaacaacaataatcttgcccgtgtggacctgaggatcgacggacggaccgtcgggaccttttattaccagggcacatacccctgggaggccccaattgacaatgtttatgtcagtgcggggagtcatacagtcgaaatcactgttactgcggataacggcacatgggacgtgtatgccgactacctggtgatacagtgactcgagggggggcccggtacccaattcgccctatagtgagtcgtattacaattcactggccgtcgttttacaacgtcgtgactgggaaaaccctggcgttacccaacttaatcgccttgcagcacatccccctttcgccagctggcgtaatagcgaagaggcccgcaccgatcgcccttcccaacagttgcgcagcctgaatggcgaatggaaattgtaagcgttaatattttgttaaaattcgcgttaaatttttgttaaatcagctcattttttaaccaataggccgaaatcggcaaaatcccttataaatcaaaagaatagaccgagatagggttgagtgttgttccagtttggaacaagagtccactattaaagaacgtggactccaacgtcaaagggcgaaaaaccgtctatcagggcgatggcccactacgtgaaccatcaccctaatcaagttttttggggtcgaggtgccgtaaagcactaaatcggaaccctaaagggagcccccgatttagagcttgacggggaaagccggcgaacgtggcgagaaaggaagggaagaaagcgaaaggagcgggcgctagggcgctggcaagtgtagcggtcacgctgcgcgtaaccaccacacccgccgcgcttaatgcgccgctacagggcgcgtcaggtg

SEQ ID NO: 3119 - DNA, 4844 bp, Artificial Sequence
  Synthetic Construct, AS-119 intein modified protein encoding nucleic acids in pBluescript
gcacttttcggggaaatgtgcgcggaacccctatttgtttatttttctaaatacattcaaatatgtatccgctcatgagacaataaccctgataaatgcttcaataatattgaaaaaggaagagtatgagtattcaacatttccgtgtcgcccttattcccttttttgcggcattttgccttcctgtttttgctcacccagaaacgctggtgaaagtaaaagatgctgaagatcagttgggtgcacgagtgggttacatcgaactggatctcaacagcggtaagatccttgagagttttcgccccgaagaacgttttccaatgatgagcacttttaaagttctgctatgtggcgcggtattatcccgtattgacgccgggcaagagcaactcggtcgccgcatacactattctcagaatgacttggttgagtactcaccagtcacagaaaagcatcttacggatggcatgacagtaagagaattatgcagtgctgccataaccatgagtgataacactgcggccaacttacttctgacaacgatcggaggaccgaaggagctaaccgcttttttgcacaacatgggggatcatgtaactcgccttgatcgttgggaaccggagctgaatgaagccataccaaacgacgagcgtgacaccacgatgcctgtagcaatggcaacaacgttgcgcaaactattaactggcgaactacttactctagcttcccggcaacaattaatagactggatggaggcggataaagttgcaggaccacttctgcgctcggcccttccggctggctggtttattgctgataaatctggagccggtgagcgtgggtctcgcggtatcattgcagcactggggccagatggtaagccctcccgtatcgtagttatctacacgacggggagtcaggcaactatggatgaacgaaatagacagatcgctgagataggtgcctcactgattaagcattggtaactgtcagaccaagtttactcatatatactttagattgatttaaaacttcatttttaatttaaaaggatctaggtgaagatcctttttgataatctcatgaccaaaatcccttaacgtgagttttcgttccactgagcgtcagaccccgtagaaaagatcaaaggatcttcttgagatcctttttttctgcgcgtaatctgctgcttgcaaacaaaaaaaccaccgctaccagcggtggtttgtttgccggatcaagagctaccaactctttttccgaaggtaactggcttcagcagagcgcagataccaaatactgtccttctagtgtagccgtagttaggccaccacttcaagaactctgtagcaccgcctacatacctcgctctgctaatcctgttaccagtggctgctgccagtggcgataagtcgtgtcttaccgggttggactcaagacgatagttaccggataaggcgcagcggtcgggctgaacggggggttcgtgcacacagcccagcttggagcgaacgacctacaccgaactgagatacctacagcgtgagctatgagaaagcgccacgcttcccgaagggagaaaggcggacaggtatccggtaagcggcagggtcggaacaggagagcgcacgagggagcttccagggggaaacgcctggtatctttatagtcctgtcgggtttcgccacctctgacttgagcgtcgatttttgtgatgctcgtcaggggggcggagcctatggaaaaacgccagcaacgcggcctttttacggttcctggccttttgctggccttttgctcacatgttctttcctgcgttatcccctgattctgtggataaccgtattaccgcctttgagtgagctgataccgctcgccgcagccgaacgaccgagcgcagcgagtcagtgagcgaggaagcggaagagcgcccaatacgcaaaccgcctctccccgcgcgttggccgattcattaatgcagctggcacgacaggtttcccgactggaaagcgggcagtgagcgcaacgcaattaatgtgagttagctcactcattaggcaccccaggctttacactttatgcttccggctcgtatgttgtgtggaattgtgagcggataacaatttcacacaggaaacagcatatgcaaacaagcattactctgacatccaacgcatccggtacgtttgacggttactattacgaactctggaaggatactggcaatacaacaatgacggtctacactcaaggtcgcttttcctgccagtggtcgaacatcaataacgcgttgtttaggaccgggaagaaatacaaccagaattggcagtctcttggcacaatccggatcacgtactctgcgacttacaacccaaacgggaactcctacttgtgtatctatggctggtctaccaacccattggtcgagttctacatcgttgagtcctgggggaactggagaccgcctggtgccacgtccctgggccaagtgacaatcgatggcgggacctacgacatctataggacgacacgcgtcaaccagcctgctcagccgctggattcgctcgttctcgcgcctacggggttccgccgcatgggggatctcagggagggggatgaggtcgtggtccctaacggcgagatcgcgctgattgacggggtcttcccacagggcgtcagggacgtttggcggatcgtgctgagcgatggctccagcgtcgagtgcgacgatgagcacctctggattgtcggcacatcgtgcgggtggcataggggccagactccgaaggtcatgaccacgcgcgagatcaggctcgacacattcaaggccaacggctcctccaagtggtatgtgccagctgctaccccagtcgacctggggccagatgttggcctgccactcgacccttacctcttcggcctcctgctcggcgatgggtccttccgccacaatctgaggctcagcaccgtcgacgatgagatcagggacgctgctgctgatgctgtggctccggactgccggctggtgcccgtcaccggctcgcgctgcgattacacgatccagctcaagcagcggtctggcggggttcgcaacccagtgattcaggctctgaggaggctggacctctgggggaagacctcccacggcaagttcatccctgaggatttcaagaacacgtctattaagaataggctgtcactgctccaggggctgctcgacacagatggcactgttcatgccgacgggatgtcagtgtccctcaggagcgcttcgctgaggctcgctgaggacgtcgcttggctggttcgctctctcggcgggagggctcgggtcctcccagagaaggctgccttccatgtttcagtggctctgccagacgagtacgctcctttccggctctcccgcaaggctgatcgcgtgaggccaaggcccaagtacaatacgttccggaggggcatccgcgctgtggagtatgtgggcaggaagccggctcagtgcatttctgttgggcatccttcacatgcttacgttacggataatttcactgttactcataattccattgtggggacagccacgttcgatcagtactggagcgtgcgcacctctaagcggacttcaggaacagtgaccgtgaccgatcacttccgcgcctgggcgaaccggggcctgaacctcggcacaatagaccaaattacattgtgcgtggagggttaccaaagctctggatcagccaacatcacccagaacaccttctctcagggctcttcttccggcagttcgggtggctcatccggctccacaacgactactcgcatcgagtgtgagaacatgtccttgtccggaccctacgttagcaggatcaccaatccctttaatggtattgcgctgtacgccaacggagacacagcccgcgctaccgttaacttccccgcaagtcgcaactacaatttccgcctgcggggttgcggcaacaacaataatcttgcccgtgtggacctgaggatcgacggacggaccgtcgggaccttttattaccagggcacatacccctgggaggccccaattgacaatgtttatgtcagtgcggggagtcatacagtcgaaatcactgttactgcggataacggcacatgggacgtgtatgccgactacctggtgatacagtgactcgagggggggcccggtacccaattcgccctatagtgagtcgtattacaattcactggccgtcgttttacaacgtcgtgactgggaaaaccctggcgttacccaacttaatcgccttgcagcacatccccctttcgccagctggcgtaatagcgaagaggcccgcaccgatcgcccttcccaacagttgcgcagcctgaatggcgaatggaaattgtaagcgttaatattttgttaaaattcgcgttaaatttttgttaaatcagctcattttttaaccaataggccgaaatcggcaaaatcccttataaatcaaaagaatagaccgagatagggttgagtgttgttccagtttggaacaagagtccactattaaagaacgtggactccaacgtcaaagggcgaaaaaccgtctatcagggcgatggcccactacgtgaaccatcaccctaatcaagttttttggggtcgaggtgccgtaaagcactaaatcggaaccctaaagggagcccccgatttagagcttgacggggaaagccggcgaacgtggcgagaaaggaagggaagaaagcgaaaggagcgggcgctagggcgctggcaagtgtagcggtcacgctgcgcgtaaccaccacacccgccgcgcttaatgcgccgctacagggcgcgtcaggtg

SEQ ID NO: 3120 - DNA, 5327 bp, Artificial Sequence
  Synthetic Construct, AS-120 intein modified protein encoding nucleic acids in pBluescript
gcacttttcggggaaatgtgcgcggaacccctatttgtttatttttctaaatacattcaaatatgtatccgctcatgagacaataaccctgataaatgcttcaataatattgaaaaaggaagagtatgagtattcaacatttccgtgtcgcccttattcccttttttgcggcattttgccttcctgtttttgctcacccagaaacgctggtgaaagtaaaagatgctgaagatcagttgggtgcacgagtgggttacatcgaactggatctcaacagcggtaagatccttgagagttttcgccccgaagaacgttttccaatgatgagcacttttaaagttctgctatgtggcgcggtattatcccgtattgacgccgggcaagagcaactcggtcgccgcatacactattctcagaatgacttggttgagtactcaccagtcacagaaaagcatcttacggatggcatgacagtaagagaattatgcagtgctgccataaccatgagtgataacactgcggccaacttacttctgacaacgatcggaggaccgaaggagctaaccgcttttttgcacaacatgggggatcatgtaactcgccttgatcgttgggaaccggagctgaatgaagccataccaaacgacgagcgtgacaccacgatgcctgtagcaatggcaacaacgttgcgcaaactattaactggcgaactacttactctagcttcccggcaacaattaatagactggatggaggcggataaagttgcaggaccacttctgcgctcggcccttccggctggctggtttattgctgataaatctggagccggtgagcgtgggtctcgcggtatcattgcagcactggggccagatggtaagccctcccgtatcgtagttatctacacgacggggagtcaggcaactatggatgaacgaaatagacagatcgctgagataggtgcctcactgattaagcattggtaactgtcagaccaagtttactcatatatactttagattgatttaaaacttcatttttaatttaaaaggatctaggtgaagatcctttttgataatctcatgaccaaaatcccttaacgtgagttttcgttccactgagcgtcagaccccgtagaaaagatcaaaggatcttcttgagatcctttttttctgcgcgtaatctgctgcttgcaaacaaaaaaaccaccgctaccagcggtggtttgtttgccggatcaagagctaccaactctttttccgaaggtaactggcttcagcagagcgcagataccaaatactgtccttctagtgtagccgtagttaggccaccacttcaagaactctgtagcaccgcctacatacctcgctctgctaatcctgttaccagtggctgctgccagtggcgataagtcgtgtcttaccgggttggactcaagacgatagttaccggataaggcgcagcggtcgggctgaacggggggttcgtgcacacagcccagcttggagcgaacgacctacaccgaactgagatacctacagcgtgagctatgagaaagcgccacgcttcccgaagggagaaaggcggacaggtatccggtaagcggcagggtcggaacaggagagcgcacgagggagcttccagggggaaacgcctggtatctttatagtcctgtcgggtttcgccacctctgacttgagcgtcgatttttgtgatgctcgtcaggggggcggagcctatggaaaaacgccagcaacgcggcctttttacggttcctggccttttgctggccttttgctcacatgttctttcctgcgttatcccctgattctgtggataaccgtattaccgcctttgagtgagctgataccgctcgccgcagccgaacgaccgagcgcagcgagtcagtgagcgaggaagcggaagagcgcccaatacgcaaaccgcctctccccgcgcgttggccgattcattaatgcagctggcacgacaggtttcccgactggaaagcgggcagtgagcgcaacgcaattaatgtgagttagctcactcattaggcaccccaggctttacactttatgcttccggctcgtatgttgtgtggaattgtgagcggataacaatttcacacaggaaacagcatatgcaaacaagcattactctgacatccaacgcatccggtacgtttgacggttactattacgaactctggaaggatactggcaatacaacaatgacggtctacactcaaggtcgcttttcctgccagtggtcgaacatcaataacgcgttgtttaggaccgggaagaaatacaaccagaattggcagtctcttggcacaatccggatcacgtactctgcgacttacaacccaaacgggaactcctacttgtgtatctatggctggtctaccaacccattggtcgagttctacatcgttgagtcctgggggaactggagaccgcctggtgccacgtccctgggccaagtgacaatcgatggcgggacctacgacatctataggacgacacgcgtcaaccagccttgcttcgctaaggggacacaggttatgatggcggacgggtcggacaagtcgattgaggatattcagctcggggagaatgttatgggcaaggacggcacaccaaggactgtgatctccctcccccgcgggaaggagacaatgtacgaggtctgccactccagcaccaagggcaccacgaaggacacgctgatgaactacgtgtgcagcgggaatcataagatcgtcatgcagacaccacagcagatcggcattactgagcacggcattgacgggaagacctacacgagcgtctcgtacttcgctctcagggattcgcagcacggctaccctatcgttaagaagctgacgaagtctttcgagcatcagcagcacggcgggaaggagcagaccctcatcacggttaacaatttcgtgtcgtctctgaagtcggagccgattaactgggacgtggaggccaagcattacgagtccctcggccactacgtcaagaagtgcagctaccagctgatcaacccggttttccatcagagcggcaagctcgcccaggagattgcgtcgctgaattactctaaggacaaggctcccctcctggcctggctcatcggcttctgggtgggcaacggggctatgcgccactctcagttcgtggtcgagtcacaggacattgagctcgtcaacaggatccaggatattgcgggcctcctgaatctgtccgcgacaactgcttgctactactctggctcaaaggacgatgaggccaagctcgcgaagctgaactcatccagcgctgagggcttcgaggacgacctggaggggaatccaagcgtgaaggagctcgcggacatggataggctgtccgagagcaagacagcgactctgcctaccgctttcggcgtcgagaacatcgacgagctcatcatttcactgggcgaggggaggggcaacgggaatgtcttcgcccaggttatcggctctttcgggattgacctcgctgacaaggatacactggttactaagatcgcccatgagctcgctggcgacgccttcgaggtgagggagcagttcgtggctggcctggtcgatgctgctggctacgtgcgcaaggacgtgtacgatcacgcgtcagaggctaccatctccacggagtcgaagtctaccgtcctcggcctggttaagattgccaggtccctggggatcaagattaccgtgacgtcagacgattccgacgatagcgacgagcacgatcatgcgcactgcggccatgaccacgggtcgtcttcatcctacacagccgtcatgactggggatgcgctcacgaacagcatgcggttctgcgcgatcggccgcaatagggttgctgccaaggagttcatgcgccaggctgtgcccttctacttcagcctggagaagaagtcggaggacgattactacggcatcacagttccagataatacggataagcagtacctgctctcttctatggctctcgttcataattccattgtggggacagccacgttcgatcagtactggagcgtgcgcacctctaagcggacttcaggaacagtgaccgtgaccgatcacttccgcgcctgggcgaaccggggcctgaacctcggcacaatagaccaaattacattgtgcgtggagggttaccaaagctctggatcagccaacatcacccagaacaccttctctcagggctcttcttccggcagttcgggtggctcatccggctccacaacgactactcgcatcgagtgtgagaacatgtccttgtccggaccctacgttagcaggatcaccaatccctttaatggtattgcgctgtacgccaacggagacacagcccgcgctaccgttaacttccccgcaagtcgcaactacaatttccgcctgcggggttgcggcaacaacaataatcttgcccgtgtggacctgaggatcgacggacggaccgtcgggaccttttattaccagggcacatacccctgggaggccccaattgacaatgtttatgtcagtgcggggagtcatacagtcgaaatcactgttactgcggataacggcacatgggacgtgtatgccgactacctggtgatacagtgactcgagggggggcccggtacccaattcgccctatagtgagtcgtattacaattcactggccgtcgttttacaacgtcgtgactgggaaaaccctggcgttacccaacttaatcgccttgcagcacatccccctttcgccagctggcgtaatagcgaagaggcccgcaccgatcgcccttcccaacagttgcgcagcctgaatggcgaatggaaattgtaagcgttaatattttgttaaaattcgcgttaaatttttgttaaatcagctcattttttaaccaataggccgaaatcggcaaaatcccttataaatcaaaagaatagaccgagatagggttgagtgttgttccagtttggaacaagagtccactattaaagaacgtggactccaacgtcaaagggcgaaaaaccgtctatcagggcgatggcccactacgtgaaccatcaccctaatcaagttttttggggtcgaggtgccgtaaagcactaaatcggaaccctaaagggagcccccgatttagagcttgacggggaaagccggcgaacgtggcgagaaaggaagggaagaaagcgaaaggagcgggcgctagggcgctggcaagtgtagcggtcacgctgcgcgtaaccaccacacccgccgcgcttaatgcgccgctacagggcgcgtcaggtg

SEQ ID NO: 3121 - DNA, 5270 bp, Artificial Sequence
  Synthetic Construct, AS-121 intein modified protein encoding nucleic acids in pBluescript
gcacttttcggggaaatgtgcgcggaacccctatttgtttatttttctaaatacattcaaatatgtatccgctcatgagacaataaccctgataaatgcttcaataatattgaaaaaggaagagtatgagtattcaacatttccgtgtcgcccttattcccttttttgcggcattttgccttcctgtttttgctcacccagaaacgctggtgaaagtaaaagatgctgaagatcagttgggtgcacgagtgggttacatcgaactggatctcaacagcggtaagatccttgagagttttcgccccgaagaacgttttccaatgatgagcacttttaaagttctgctatgtggcgcggtattatcccgtattgacgccgggcaagagcaactcggtcgccgcatacactattctcagaatgacttggttgagtactcaccagtcacagaaaagcatcttacggatggcatgacagtaagagaattatgcagtgctgccataaccatgagtgataacactgcggccaacttacttctgacaacgatcggaggaccgaaggagctaaccgcttttttgcacaacatgggggatcatgtaactcgccttgatcgttgggaaccggagctgaatgaagccataccaaacgacgagcgtgacaccacgatgcctgtagcaatggcaacaacgttgcgcaaactattaactggcgaactacttactctagcttcccggcaacaattaatagactggatggaggcggataaagttgcaggaccacttctgcgctcggcccttccggctggctggtttattgctgataaatctggagccggtgagcgtgggtctcgcggtatcattgcagcactggggccagatggtaagccctcccgtatcgtagttatctacacgacggggagtcaggcaactatggatgaacgaaatagacagatcgctgagataggtgcctcactgattaagcattggtaactgtcagaccaagtttactcatatatactttagattgatttaaaacttcatttttaatttaaaaggatctaggtgaagatcctttttgataatctcatgaccaaaatcccttaacgtgagttttcgttccactgagcgtcagaccccgtagaaaagatcaaaggatcttcttgagatcctttttttctgcgcgtaatctgctgcttgcaaacaaaaaaaccaccgctaccagcggtggtttgtttgccggatcaagagctaccaactctttttccgaaggtaactggcttcagcagagcgcagataccaaatactgtccttctagtgtagccgtagttaggccaccacttcaagaactctgtagcaccgcctacatacctcgctctgctaatcctgttaccagtggctgctgccagtggcgataagtcgtgtcttaccgggttggactcaagacgatagttaccggataaggcgcagcggtcgggctgaacggggggttcgtgcacacagcccagcttggagcgaacgacctacaccgaactgagatacctacagcgtgagctatgagaaagcgccacgcttcccgaagggagaaaggcggacaggtatccggtaagcggcagggtcggaacaggagagcgcacgagggagcttccagggggaaacgcctggtatctttatagtcctgtcgggtttcgccacctctgacttgagcgtcgatttttgtgatgctcgtcaggggggcggagcctatggaaaaacgccagcaacgcggcctttttacggttcctggccttttgctggccttttgctcacatgttctttcctgcgttatcccctgattctgtggataaccgtattaccgcctttgagtgagctgataccgctcgccgcagccgaacgaccgagcgcagcgagtcagtgagcgaggaagcggaagagcgcccaatacgcaaaccgcctctccccgcgcgttggccgattcattaatgcagctggcacgacaggtttcccgactggaaagcgggcagtgagcgcaacgcaattaatgtgagttagctcactcattaggcaccccaggctttacactttatgcttccggctcgtatgttgtgtggaattgtgagcggataacaatttcacacaggaaacagcatatgcaaacaagcattactctgacatccaacgcatccggtacgtttgacggttactattacgaactctggaaggatactggcaatacaacaatgacggtctacactcaaggtcgcttttcctgccagtggtcgaacatcaataacgcgttgtttaggaccgggaagaaatacaaccagaattggcagtctcttggcacaatccggatcacgtactctgcgacttacaacccaaacgggaactcctacttgtgtatctatggctggtctaccaacccattggtcgagttctacatcgttgagtcctgggggaactggagaccgcctggtgccacgtccctgggccaagtgacaatcgatggcgggacctacgacatctataggacgacacgcgtcaaccagccttcagtctcttacgatacgccagtcctcatcagggaccctattaacaagatccatctcgtgaagatcggggagttcattgataagttctacgaggagggcgaggagaggacggctaagcacgtgaatgggtactacgtcctctcccatgacggcttccaggtggtctggaagccgatcaagtatgtgctgcggcaccgcacaaacgagatctacgagatcatctacgagggcgggggcaagctggaggctaccggctcgcattctgttttcgtgctcgacccggatacgctggatatcgtcgagaagcccgttatgctcctgaataagggggagtacctggtttctttcaacggcgtgaaggagaataaggaccaccagacaatcgacctcattgatctggtttcggactacaacgatgtctacgttgataatatcccatctgagctcaagaagcatactgggggcaggaacccaatccctctcaagcagtacatgatcctgaggaagcgggtcattacaaagaagaacaatagcctcatcaagctgcgcaggtcgaagtacactctcccgattcggctcgtgctggacgagaagctcgccttcctgttcggggcctacatcgctaacggctgcgtcaaggagaggagggacaagctgatctgcttcaccttcggcaagtccgccaagaacatcgcggataaggtcatgaatattatgtacgagaagttcaacatcaagccattcattgacgatagggggacatacatcatctacgagtaccctcacactctcctggcgatcattttcgagaagctcctgggccgcaagctggaggagaagaagatgccagagatcctgtggtccagccctaagagcgtgattcgcgcgttcttcgagggcctcagggcttactcccagcgcaccctgaggaggaggtacacgagctacaccacggctaacaagaatctcgcctaccagctcctgtggctggctaggttcgctggcttctactcggtcctcaaggaggagaaggaggccgggaagaacaatggcaagacgtactaccatgtgatcgtctacctggaccagtcttacaggaagccgaacgcgtcagagcgggttccggtgaagcccatcctcaagctgattaagtacacaaagccaaggactatgccaccagagctcgcttacatcaagaggcgggagttcatttcaaggaagaccgcgctcaaggctctggagtggatccgcagggacggctcattcacggatttctcccgcgagtacctcaggaagatcgagtccctgattaacggggacatcattgtcctgaagatcaaggatgttcgcaagaagcagtacaagggctacgtgtacgacatttcagttccaattacggaggctttcttcgggggcaacattccaatcctgctccacaactccattgtggggacagccacgttcgatcagtactggagcgtgcgcacctctaagcggacttcaggaacagtgaccgtgaccgatcacttccgcgcctgggcgaaccggggcctgaacctcggcacaatagaccaaattacattgtgcgtggagggttaccaaagctctggatcagccaacatcacccagaacaccttctctcagggctcttcttccggcagttcgggtggctcatccggctccacaacgactactcgcatcgagtgtgagaacatgtccttgtccggaccctacgttagcaggatcaccaatccctttaatggtattgcgctgtacgccaacggagacacagcccgcgctaccgttaacttccccgcaagtcgcaactacaatttccgcctgcggggttgcggcaacaacaataatcttgcccgtgtggacctgaggatcgacggacggaccgtcgggaccttttattaccagggcacatacccctgggaggccccaattgacaatgtttatgtcagtgcggggagtcatacagtcgaaatcactgttactgcggataacggcacatgggacgtgtatgccgactacctggtgatacagtgactcgagggggggcccggtacccaattcgccctatagtgagtcgtattacaattcactggccgtcgttttacaacgtcgtgactgggaaaaccctggcgttacccaacttaatcgccttgcagcacatccccctttcgccagctggcgtaatagcgaagaggcccgcaccgatcgcccttcccaacagttgcgcagcctgaatggcgaatggaaattgtaagcgttaatattttgttaaaattcgcgttaaatttttgttaaatcagctcattttttaaccaataggccgaaatcggcaaaatcccttataaatcaaaagaatagaccgagatagggttgagtgttgttccagtttggaacaagagtccactattaaagaacgtggactccaacgtcaaagggcgaaaaaccgtctatcagggcgatggcccactacgtgaaccatcaccctaatcaagttttttggggtcgaggtgccgtaaagcactaaatcggaaccctaaagggagcccccgatttagagcttgacggggaaagccggcgaacgtggcgagaaaggaagggaagaaagcgaaaggagcgggcgctagggcgctggcaagtgtagcggtcacgctgcgcgtaaccaccacacccgccgcgcttaatgcgccgctacagggcgcgtcaggtg

SEQ ID NO: 3122 - DNA, 4880 bp, Artificial Sequence
  Synthetic Construct, AS-122 intein modified protein encoding nucleic acids in pBluescript
gcacttttcggggaaatgtgcgcggaacccctatttgtttatttttctaaatacattcaaatatgtatccgctcatgagacaataaccctgataaatgcttcaataatattgaaaaaggaagagtatgagtattcaacatttccgtgtcgcccttattcccttttttgcggcattttgccttcctgtttttgctcacccagaaacgctggtgaaagtaaaagatgctgaagatcagttgggtgcacgagtgggttacatcgaactggatctcaacagcggtaagatccttgagagttttcgccccgaagaacgttttccaatgatgagcacttttaaagttctgctatgtggcgcggtattatcccgtattgacgccgggcaagagcaactcggtcgccgcatacactattctcagaatgacttggttgagtactcaccagtcacagaaaagcatcttacggatggcatgacagtaagagaattatgcagtgctgccataaccatgagtgataacactgcggccaacttacttctgacaacgatcggaggaccgaaggagctaaccgcttttttgcacaacatgggggatcatgtaactcgccttgatcgttgggaaccggagctgaatgaagccataccaaacgacgagcgtgacaccacgatgcctgtagcaatggcaacaacgttgcgcaaactattaactggcgaactacttactctagcttcccggcaacaattaatagactggatggaggcggataaagttgcaggaccacttctgcgctcggcccttccggctggctggtttattgctgataaatctggagccggtgagcgtgggtctcgcggtatcattgcagcactggggccagatggtaagccctcccgtatcgtagttatctacacgacggggagtcaggcaactatggatgaacgaaatagacagatcgctgagataggtgcctcactgattaagcattggtaactgtcagaccaagtttactcatatatactttagattgatttaaaacttcatttttaatttaaaaggatctaggtgaagatcctttttgataatctcatgaccaaaatcccttaacgtgagttttcgttccactgagcgtcagaccccgtagaaaagatcaaaggatcttcttgagatcctttttttctgcgcgtaatctgctgcttgcaaacaaaaaaaccaccgctaccagcggtggtttgtttgccggatcaagagctaccaactctttttccgaaggtaactggcttcagcagagcgcagataccaaatactgtccttctagtgtagccgtagttaggccaccacttcaagaactctgtagcaccgcctacatacctcgctctgctaatcctgttaccagtggctgctgccagtggcgataagtcgtgtcttaccgggttggactcaagacgatagttaccggataaggcgcagcggtcgggctgaacggggggttcgtgcacacagcccagcttggagcgaacgacctacaccgaactgagatacctacagcgtgagctatgagaaagcgccacgcttcccgaagggagaaaggcggacaggtatccggtaagcggcagggtcggaacaggagagcgcacgagggagcttccagggggaaacgcctggtatctttatagtcctgtcgggtttcgccacctctgacttgagcgtcgatttttgtgatgctcgtcaggggggcggagcctatggaaaaacgccagcaacgcggcctttttacggttcctggccttttgctggccttttgctcacatgttctttcctgcgttatcccctgattctgtggataaccgtattaccgcctttgagtgagctgataccgctcgccgcagccgaacgaccgagcgcagcgagtcagtgagcgaggaagcggaagagcgcccaatacgcaaaccgcctctccccgcgcgttggccgattcattaatgcagctggcacgacaggtttcccgactggaaagcgggcagtgagcgcaacgcaattaatgtgagttagctcactcattaggcaccccaggctttacactttatgcttccggctcgtatgttgtgtggaattgtgagcggataacaatttcacacaggaaacagcatatgcaaacaagcattactctgacatccaacgcatccggtacgtttgacggttactattacgaactctggaaggatactggcaatacaacaatgacggtctacactcaaggtcgcttttcctgccagtggtcgaacatcaataacgcgttgtttaggaccgggaagaaatacaaccagaattggcagtctcttggcacaatccggatcacgtactctgcgacttacaacccaaacgggaactcctacttgtgtatctatggctggtctaccaacccattggtcgagttctacatcgttgagtcctgggggaactggagaccgcctggtgccacgtccctgggccaagtgacaatcgatggcgggacctacgacatctataggacgacacgcgtcaaccagccttcataccataaggatttcaagattatgctcgctgacgggcgcaaggttcgcatcggggatctcgtggatgagctgatcggcaagaatagggagaaggttatcaagggcaaggacacagagattctgttcgtggacgatctcttcctcctgtcgtacaatatgcggtctggggagcaggttctggtgaaggctgatcgggtgagccgccacaaggctccagaccagttcatcaagctgcgcttctcgaacggcgctgagatcattgtcaccccggagcatcccgttctcatcattaacaatggcaagatcaagaccgttagggcggatacggtgcggaaggggaccctgacgatcggcgtgctcgggcacaagatcattaaggaggtcaacgaggacgatatcattaacaatatccgcaggaagattgtgctggacaaggagctcccgtacatccacgctaagaatatttcagaggccgtcgagatgcgggaccagctgatgtccatcgatattcccaccttcatcgttaagcataagaacgagattcgcctgtacccatccggcccttgcagcctcaggaggctcctgctcatgcacggggtcgaggaggtggtcttctcggacgagctgctctacgagatcatgaattgccatctctacccggccacctggtacgagctgctctactccatgggcctgacgaagatcgccaaggagctcaacgtgtacgacttcgagattctggcgggcatcattaagaaggtggagaaggaggtcatcatgctctctcaggtcctggggctccgcaacgagacacagactgagctgctccatctgaagtcaaggcgggagctgctcatcaggctcaaggacaagctggatatgctccgcaagaggctgaaggacctggaggaggccctcggcaaggatgccgtgatcaggatgattacagacgtcgaggttatcaagaacactgactccgattgggtctacgacattactattgagccttaccacctcttcgtttcggatgggctcattctgcataactccattgtggggacagccacgttcgatcagtactggagcgtgcgcacctctaagcggacttcaggaacagtgaccgtgaccgatcacttccgcgcctgggcgaaccggggcctgaacctcggcacaatagaccaaattacattgtgcgtggagggttaccaaagctctggatcagccaacatcacccagaacaccttctctcagggctcttcttccggcagttcgggtggctcatccggctccacaacgactactcgcatcgagtgtgagaacatgtccttgtccggaccctacgttagcaggatcaccaatccctttaatggtattgcgctgtacgccaacggagacacagcccgcgctaccgttaacttccccgcaagtcgcaactacaatttccgcctgcggggttgcggcaacaacaataatcttgcccgtgtggacctgaggatcgacggacggaccgtcgggaccttttattaccagggcacatacccctgggaggccccaattgacaatgtttatgtcagtgcggggagtcatacagtcgaaatcactgttactgcggataacggcacatgggacgtgtatgccgactacctggtgatacagtgactcgagggggggcccggtacccaattcgccctatagtgagtcgtattacaattcactggccgtcgttttacaacgtcgtgactgggaaaaccctggcgttacccaacttaatcgccttgcagcacatccccctttcgccagctggcgtaatagcgaagaggcccgcaccgatcgcccttcccaacagttgcgcagcctgaatggcgaatggaaattgtaagcgttaatattttgttaaaattcgcgttaaatttttgttaaatcagctcattttttaaccaataggccgaaatcggcaaaatcccttataaatcaaaagaatagaccgagatagggttgagtgttgttccagtttggaacaagagtccactattaaagaacgtggactccaacgtcaaagggcgaaaaaccgtctatcagggcgatggcccactacgtgaaccatcaccctaatcaagttttttggggtcgaggtgccgtaaagcactaaatcggaaccctaaagggagcccccgatttagagcttgacggggaaagccggcgaacgtggcgagaaaggaagggaagaaagcgaaaggagcgggcgctagggcgctggcaagtgtagcggtcacgctgcgcgtaaccaccacacccgccgcgcttaatgcgccgctacagggcgcgtcaggtg

SEQ ID NO: 3123 - DNA, 4862 bp, Artificial Sequence
  Synthetic Construct, AS-123 intein modified protein encoding nucleic acids in pBluescript
gcacttttcggggaaatgtgcgcggaacccctatttgtttatttttctaaatacattcaaatatgtatccgctcatgagacaataaccctgataaatgcttcaataatattgaaaaaggaagagtatgagtattcaacatttccgtgtcgcccttattcccttttttgcggcattttgccttcctgtttttgctcacccagaaacgctggtgaaagtaaaagatgctgaagatcagttgggtgcacgagtgggttacatcgaactggatctcaacagcggtaagatccttgagagttttcgccccgaagaacgttttccaatgatgagcacttttaaagttctgctatgtggcgcggtattatcccgtattgacgccgggcaagagcaactcggtcgccgcatacactattctcagaatgacttggttgagtactcaccagtcacagaaaagcatcttacggatggcatgacagtaagagaattatgcagtgctgccataaccatgagtgataacactgcggccaacttacttctgacaacgatcggaggaccgaaggagctaaccgcttttttgcacaacatgggggatcatgtaactcgccttgatcgttgggaaccggagctgaatgaagccataccaaacgacgagcgtgacaccacgatgcctgtagcaatggcaacaacgttgcgcaaactattaactggcgaactacttactctagcttcccggcaacaattaatagactggatggaggcggataaagttgcaggaccacttctgcgctcggcccttccggctggctggtttattgctgataaatctggagccggtgagcgtgggtctcgcggtatcattgcagcactggggccagatggtaagccctcccgtatcgtagttatctacacgacggggagtcaggcaactatggatgaacgaaatagacagatcgctgagataggtgcctcactgattaagcattggtaactgtcagaccaagtttactcatatatactttagattgatttaaaacttcatttttaatttaaaaggatctaggtgaagatcctttttgataatctcatgaccaaaatcccttaacgtgagttttcgttccactgagcgtcagaccccgtagaaaagatcaaaggatcttcttgagatcctttttttctgcgcgtaatctgctgcttgcaaacaaaaaaaccaccgctaccagcggtggtttgtttgccggatcaagagctaccaactctttttccgaaggtaactggcttcagcagagcgcagataccaaatactgtccttctagtgtagccgtagttaggccaccacttcaagaactctgtagcaccgcctacatacctcgctctgctaatcctgttaccagtggctgctgccagtggcgataagtcgtgtcttaccgggttggactcaagacgatagttaccggataaggcgcagcggtcgggctgaacggggggttcgtgcacacagcccagcttggagcgaacgacctacaccgaactgagatacctacagcgtgagctatgagaaagcgccacgcttcccgaagggagaaaggcggacaggtatccggtaagcggcagggtcggaacaggagagcgcacgagggagcttccagggggaaacgcctggtatctttatagtcctgtcgggtttcgccacctctgacttgagcgtcgatttttgtgatgctcgtcaggggggcggagcctatggaaaaacgccagcaacgcggcctttttacggttcctggccttttgctggccttttgctcacatgttctttcctgcgttatcccctgattctgtggataaccgtattaccgcctttgagtgagctgataccgctcgccgcagccgaacgaccgagcgcagcgagtcagtgagcgaggaagcggaagagcgcccaatacgcaaaccgcctctccccgcgcgttggccgattcattaatgcagctggcacgacaggtttcccgactggaaagcgggcagtgagcgcaacgcaattaatgtgagttagctcactcattaggcaccccaggctttacactttatgcttccggctcgtatgttgtgtggaattgtgagcggataacaatttcacacaggaaacagcatatgcaaacaagcattactctgacatccaacgcatccggtacgtttgacggttactattacgaactctggaaggatactggcaatacaacaatgacggtctacactcaaggtcgcttttcctgccagtggtcgaacatcaataacgcgttgtttaggaccgggaagaaatacaaccagaattggcagtctcttggcacaatccggatcacgtactctgcgacttacaacccaaacgggaactcctacttgtgtatctatggctggtctaccaacccattggtcgagttctacatcgttgagtcctgggggaactggagaccgcctggtgccacgtccctgggccaagtgacaatcgatggcgggacctacgacatctataggacgacacgcgtcaaccagccttgcctcgggaaggggacaccggttatgatgtacgatgggcggacaaagccagtggagaaggtggaggtcggggacaggctcatgggggacgatggcagcccaaggacggtgcagtcgctggccagggggagggagcagatgtactgggtccgccagaagaggggcatggactacagggttaacgagagccacatcctctcgctgaagaagtctaggagggagggcgcccgcgacagggggtcaatcgcggatatttccgtccgcgactacctggatcagtctgacaagtggaaggacgataacaagggcttcaaggtggctgctgagttcccagaccagccagtccccctcgatccttacttcctcggcctgtggctcggcgatgggaagtccgacaatgctaggatctacaccacggacgaggaggtcatcacgggcctgcaggagattgccgagaagcggggggacacaatttcagtgtccgatgagcatcggcgctgcccagcctacctcgtcaagtctggcgacaggggcggggctatggctaccagggagtcagttcagggcgctctgagggctctcggcgtgctgggggacaagcacatccctcatctgtacctcggcaactccagggggaagcggctcaggctcctggctggcctgattgacagcgatggccacctcaatgacgggcatggcgggacgtacgagatcacacagtccagcgagcagctggcgagggacattaagttcctctgcgatactctgggctaccggacatcgctcactcagaagaccgctcgcatctcgtctaccggctacgagtccgaggttcacagggtgcggttcaacgggaatgttgacgagattccggtgcgggtcgagcgcaagaaggcttccccatggactgatgtcagggactggcggatgaccggcatcgatgtcgagcccgacggcgttggggattacttcggcttcactctggatggcaatgggcgcttcctcctcggggatggcactgttactcataattccattgtggggacagccacgttcgatcagtactggagcgtgcgcacctctaagcggacttcaggaacagtgaccgtgaccgatcacttccgcgcctgggcgaaccggggcctgaacctcggcacaatagaccaaattacattgtgcgtggagggttaccaaagctctggatcagccaacatcacccagaacaccttctctcagggctcttcttccggcagttcgggtggctcatccggctccacaacgactactcgcatcgagtgtgagaacatgtccttgtccggaccctacgttagcaggatcaccaatccctttaatggtattgcgctgtacgccaacggagacacagcccgcgctaccgttaacttccccgcaagtcgcaactacaatttccgcctgcggggttgcggcaacaacaataatcttgcccgtgtggacctgaggatcgacggacggaccgtcgggaccttttattaccagggcacatacccctgggaggccccaattgacaatgtttatgtcagtgcggggagtcatacagtcgaaatcactgttactgcggataacggcacatgggacgtgtatgccgactacctggtgatacagtgactcgagggggggcccggtacccaattcgccctatagtgagtcgtattacaattcactggccgtcgttttacaacgtcgtgactgggaaaaccctggcgttacccaacttaatcgccttgcagcacatccccctttcgccagctggcgtaatagcgaagaggcccgcaccgatcgcccttcccaacagttgcgcagcctgaatggcgaatggaaattgtaagcgttaatattttgttaaaattcgcgttaaatttttgttaaatcagctcattttttaaccaataggccgaaatcggcaaaatcccttataaatcaaaagaatagaccgagatagggttgagtgttgttccagtttggaacaagagtccactattaaagaacgtggactccaacgtcaaagggcgaaaaaccgtctatcagggcgatggcccactacgtgaaccatcaccctaatcaagttttttggggtcgaggtgccgtaaagcactaaatcggaaccctaaagggagcccccgatttagagcttgacggggaaagccggcgaacgtggcgagaaaggaagggaagaaagcgaaaggagcgggcgctagggcgctggcaagtgtagcggtcacgctgcgcgtaaccaccacacccgccgcgcttaatgcgccgctacagggcgcgtcaggtg

SEQ ID NO: 3124 - DNA, 4904 bp, Artificial Sequence
  Synthetic Construct, AS-124 intein modified protein encoding nucleic acids in pBluescript
gcacttttcggggaaatgtgcgcggaacccctatttgtttatttttctaaatacattcaaatatgtatccgctcatgagacaataaccctgataaatgcttcaataatattgaaaaaggaagagtatgagtattcaacatttccgtgtcgcccttattcccttttttgcggcattttgccttcctgtttttgctcacccagaaacgctggtgaaagtaaaagatgctgaagatcagttgggtgcacgagtgggttacatcgaactggatctcaacagcggtaagatccttgagagttttcgccccgaagaacgttttccaatgatgagcacttttaaagttctgctatgtggcgcggtattatcccgtattgacgccgggcaagagcaactcggtcgccgcatacactattctcagaatgacttggttgagtactcaccagtcacagaaaagcatcttacggatggcatgacagtaagagaattatgcagtgctgccataaccatgagtgataacactgcggccaacttacttctgacaacgatcggaggaccgaaggagctaaccgcttttttgcacaacatgggggatcatgtaactcgccttgatcgttgggaaccggagctgaatgaagccataccaaacgacgagcgtgacaccacgatgcctgtagcaatggcaacaacgttgcgcaaactattaactggcgaactacttactctagcttcccggcaacaattaatagactggatggaggcggataaagttgcaggaccacttctgcgctcggcccttccggctggctggtttattgctgataaatctggagccggtgagcgtgggtctcgcggtatcattgcagcactggggccagatggtaagccctcccgtatcgtagttatctacacgacggggagtcaggcaactatggatgaacgaaatagacagatcgctgagataggtgcctcactgattaagcattggtaactgtcagaccaagtttactcatatatactttagattgatttaaaacttcatttttaatttaaaaggatctaggtgaagatcctttttgataatctcatgaccaaaatcccttaacgtgagttttcgttccactgagcgtcagaccccgtagaaaagatcaaaggatcttcttgagatcctttttttctgcgcgtaatctgctgcttgcaaacaaaaaaaccaccgctaccagcggtggtttgtttgccggatcaagagctaccaactctttttccgaaggtaactggcttcagcagagcgcagataccaaatactgtccttctagtgtagccgtagttaggccaccacttcaagaactctgtagcaccgcctacatacctcgctctgctaatcctgttaccagtggctgctgccagtggcgataagtcgtgtcttaccgggttggactcaagacgatagttaccggataaggcgcagcggtcgggctgaacggggggttcgtgcacacagcccagcttggagcgaacgacctacaccgaactgagatacctacagcgtgagctatgagaaagcgccacgcttcccgaagggagaaaggcggacaggtatccggtaagcggcagggtcggaacaggagagcgcacgagggagcttccagggggaaacgcctggtatctttatagtcctgtcgggtttcgccacctctgacttgagcgtcgatttttgtgatgctcgtcaggggggcggagcctatggaaaaacgccagcaacgcggcctttttacggttcctggccttttgctggccttttgctcacatgttctttcctgcgttatcccctgattctgtggataaccgtattaccgcctttgagtgagctgataccgctcgccgcagccgaacgaccgagcgcagcgagtcagtgagcgaggaagcggaagagcgcccaatacgcaaaccgcctctccccgcgcgttggccgattcattaatgcagctggcacgacaggtttcccgactggaaagcgggcagtgagcgcaacgcaattaatgtgagttagctcactcattaggcaccccaggctttacactttatgcttccggctcgtatgttgtgtggaattgtgagcggataacaatttcacacaggaaacagcatatgcaaacaagcattactctgacatccaacgcatccggtacgtttgacggttactattacgaactctggaaggatactggcaatacaacaatgacggtctacactcaaggtcgcttttcctgccagtggtcgaacatcaataacgcgttgtttaggaccgggaagaaatacaaccagaattggcagtctcttggcacaatccggatcacgtactctgcgacttacaacccaaacgggaactcctacttgtgtatctatggctggtctaccaacccattggtcgagttctacatcgttgagtcctgggggaactggagaccgcctggtgccacgtccctgggccaagtgacaatcgatggcgggacctacgacatctataggacgacacgcgtcaaccagccttgcttcgatcctgagacagaggtcgtgacagtggacggcattaggcatgtggaggagattgaggtcggggatagggtttactcgctgaacccagacacgggcgctgtcgagatcaagcccgttaccgcgacgcagagccagcattacgctggcccgatggtggagattaagaaccagcataccgacttcctggtcacgcccaatcaccgcttcctcacacagaggttcacttcgggcgagtacacagatctggagtgggagactgctggcgacatgctcggggatcgcatccgcaggaggctcccatcactgaggtccctccctgctacacaggagaggccaggccctatctcactgtccgctgtgtgcgacaggctcgctatcgagcacaagactggcccacgcgggattaaggagctgaggaggcaggctaggtggcagcctgaggagtacgagctcacagattggctgaggatcctcggctggttcgccacagaggggactctgtacaagtctaaggcgaggcagtacgagaacggcaatgtgcggggggtctcataccagaccacgctctgccagaagaacgacatcggccgctccgagattgcgacgctcctgaacaggaccgggatcacgtactccagcgaccagaatgatcatagcttctgctcgaaggttctgtacgagattctggaggctgagtgcggcagcgactcgttctctaagcacctgccaccatggatcttccagctggggccaaaggacctcaagattgtcttcgataccctcatgcagggcgactccgctgctaacggggatcggttcacaacttcgtctaatcagctggccgaggacttcatcaggctcgctatgcacattggcaggagggctttccacatgccgaacgatgggtctcacaggatccaggttaataccgtgaggggccagcggccgacgattaagcccaagcatcggcagcaggtcgactacgatggcatgatccactgcctgaccgtggcggataatcatactgtgctcgctggcaggaataggaagttcaattggactgggcagtccattgtggggacagccacgttcgatcagtactggagcgtgcgcacctctaagcggacttcaggaacagtgaccgtgaccgatcacttccgcgcctgggcgaaccggggcctgaacctcggcacaatagaccaaattacattgtgcgtggagggttaccaaagctctggatcagccaacatcacccagaacaccttctctcagggctcttcttccggcagttcgggtggctcatccggctccacaacgactactcgcatcgagtgtgagaacatgtccttgtccggaccctacgttagcaggatcaccaatccctttaatggtattgcgctgtacgccaacggagacacagcccgcgctaccgttaacttccccgcaagtcgcaactacaatttccgcctgcggggttgcggcaacaacaataatcttgcccgtgtggacctgaggatcgacggacggaccgtcgggaccttttattaccagggcacatacccctgggaggccccaattgacaatgtttatgtcagtgcggggagtcatacagtcgaaatcactgttactgcggataacggcacatgggacgtgtatgccgactacctggtgatacagtgactcgagggggggcccggtacccaattcgccctatagtgagtcgtattacaattcactggccgtcgttttacaacgtcgtgactgggaaaaccctggcgttacccaacttaatcgccttgcagcacatccccctttcgccagctggcgtaatagcgaagaggcccgcaccgatcgcccttcccaacagttgcgcagcctgaatggcgaatggaaattgtaagcgttaatattttgttaaaattcgcgttaaatttttgttaaatcagctcattttttaaccaataggccgaaatcggcaaaatcccttataaatcaaaagaatagaccgagatagggttgagtgttgttccagtttggaacaagagtccactattaaagaacgtggactccaacgtcaaagggcgaaaaaccgtctatcagggcgatggcccactacgtgaaccatcaccctaatcaagttttttggggtcgaggtgccgtaaagcactaaatcggaaccctaaagggagcccccgatttagagcttgacggggaaagccggcgaacgtggcgagaaaggaagggaagaaagcgaaaggagcgggcgctagggcgctggcaagtgtagcggtcacgctgcgcgtaaccaccacacccgccgcgcttaatgcgccgctacagggcgcgtcaggtg

SEQ ID NO: 3125 - DNA, 5117 bp, Artificial Sequence
  Synthetic Construct, AS-125 intein modified protein encoding nucleic acids in pBluescript
gcacttttcggggaaatgtgcgcggaacccctatttgtttatttttctaaatacattcaaatatgtatccgctcatgagacaataaccctgataaatgcttcaataatattgaaaaaggaagagtatgagtattcaacatttccgtgtcgcccttattcccttttttgcggcattttgccttcctgtttttgctcacccagaaacgctggtgaaagtaaaagatgctgaagatcagttgggtgcacgagtgggttacatcgaactggatctcaacagcggtaagatccttgagagttttcgccccgaagaacgttttccaatgatgagcacttttaaagttctgctatgtggcgcggtattatcccgtattgacgccgggcaagagcaactcggtcgccgcatacactattctcagaatgacttggttgagtactcaccagtcacagaaaagcatcttacggatggcatgacagtaagagaattatgcagtgctgccataaccatgagtgataacactgcggccaacttacttctgacaacgatcggaggaccgaaggagctaaccgcttttttgcacaacatgggggatcatgtaactcgccttgatcgttgggaaccggagctgaatgaagccataccaaacgacgagcgtgacaccacgatgcctgtagcaatggcaacaacgttgcgcaaactattaactggcgaactacttactctagcttcccggcaacaattaatagactggatggaggcggataaagttgcaggaccacttctgcgctcggcccttccggctggctggtttattgctgataaatctggagccggtgagcgtgggtctcgcggtatcattgcagcactggggccagatggtaagccctcccgtatcgtagttatctacacgacggggagtcaggcaactatggatgaacgaaatagacagatcgctgagataggtgcctcactgattaagcattggtaactgtcagaccaagtttactcatatatactttagattgatttaaaacttcatttttaatttaaaaggatctaggtgaagatcctttttgataatctcatgaccaaaatcccttaacgtgagttttcgttccactgagcgtcagaccccgtagaaaagatcaaaggatcttcttgagatcctttttttctgcgcgtaatctgctgcttgcaaacaaaaaaaccaccgctaccagcggtggtttgtttgccggatcaagagctaccaactctttttccgaaggtaactggcttcagcagagcgcagataccaaatactgtccttctagtgtagccgtagttaggccaccacttcaagaactctgtagcaccgcctacatacctcgctctgctaatcctgttaccagtggctgctgccagtggcgataagtcgtgtcttaccgggttggactcaagacgatagttaccggataaggcgcagcggtcgggctgaacggggggttcgtgcacacagcccagcttggagcgaacgacctacaccgaactgagatacctacagcgtgagctatgagaaagcgccacgcttcccgaagggagaaaggcggacaggtatccggtaagcggcagggtcggaacaggagagcgcacgagggagcttccagggggaaacgcctggtatctttatagtcctgtcgggtttcgccacctctgacttgagcgtcgatttttgtgatgctcgtcaggggggcggagcctatggaaaaacgccagcaacgcggcctttttacggttcctggccttttgctggccttttgctcacatgttctttcctgcgttatcccctgattctgtggataaccgtattaccgcctttgagtgagctgataccgctcgccgcagccgaacgaccgagcgcagcgagtcagtgagcgaggaagcggaagagcgcccaatacgcaaaccgcctctccccgcgcgttggccgattcattaatgcagctggcacgacaggtttcccgactggaaagcgggcagtgagcgcaacgcaattaatgtgagttagctcactcattaggcaccccaggctttacactttatgcttccggctcgtatgttgtgtggaattgtgagcggataacaatttcacacaggaaacagcatatgcaaacaagcattactctgacatccaacgcatccggtacgtttgacggttactattacgaactctggaaggatactggcaatacaacaatgacggtctacactcaaggtcgcttttcctgccagtggtcgaacatcaataacgcgttgtttaggaccgggaagaaatacaaccagaattggcagtctcttggcacaatccggatcacgtactctgcgacttacaacccaaacgggaactcctacttgtgtatctatggctggtctaccaacccattggtcgagttctacatcgttgagtcctgggggaactggagaccgcctggtgccacgtccctgggccaagtgacaatcgatggcgggacctacgacatctataggacgacacgcgtcaaccagccttgcatttcgggggatagcctcattagcctcgcctcaacgggcaagcgggtttcaatcaaggatctgctggatgagaaggatttcgagatctgggcgattaacgagcagaccatgaagctggagtctgctaaggtttcacgcgtgttctgcaccggcaagaagctggtgtacatcctcaagacgcggctggggcgcaccattaaggctacggccaaccacaggttcctcacgatcgacggctggaagcggctggatgagctgtcactcaaggagcatatcgccctcccaaggaagctggagtccagctcgctgcagctcatgtccgacgaggagctcggcctcctggggcacctgatcggcgatgggtgcaccctgcctaggcatgccatccagtacacgagcaacaagattgagctcgcggagaaggtggtcgagctggcgaaggctgtcttcggcgaccagatcaatccgaggatttcccaggagcggcagtggtaccaggtttacatcccggcgagctaccggctcacacacaacaagaagaatcccatcactaagtggctggagaacctcgacgtcttcggcctgcgcagctacgagaagttcgtgccgaatcaggtcttcgagcagccacagagggctatcgcgattttcctgcgccatctctggtcgacagacgggtgcgttaagctcatcgtggagaagtcttcacgccccgttgcttactacgccacttccagcgagaagctggctaaggacgtgcagtccctcctgctcaagctcggcatcaacgcgcgcctgtcaaagatttcccagaacggcaaggggagggataattaccacgtgacaatcactggccaggccgacctccagatcttcgtcgatcagattggggctgttgacaaggataagcaggcctccgtcgaggagatcaagacacacattgcgcagcatcaggctaacactaatagggacgtgatcccaaagcagatttggaagacatacgtcctgcctcagatccagattaagggcatcaccacgcgcgatctccagatgaggctgggcaacgcttactgcgggacggctctctacaagcacaatctgtcgcgcgagagggctgctaagatcgctaccattacgcagtctccggagatcgagaagctctcgcagtctgacatctactgggatagcatcgtgtcgattacagagactggcgtcgaggaggttttcgatctcactgttccagggccacataacttcgttgctaatgacatcatcgtgcataattccattgtggggacagccacgttcgatcagtactggagcgtgcgcacctctaagcggacttcaggaacagtgaccgtgaccgatcacttccgcgcctgggcgaaccggggcctgaacctcggcacaatagaccaaattacattgtgcgtggagggttaccaaagctctggatcagccaacatcacccagaacaccttctctcagggctcttcttccggcagttcgggtggctcatccggctccacaacgactactcgcatcgagtgtgagaacatgtccttgtccggaccctacgttagcaggatcaccaatccctttaatggtattgcgctgtacgccaacggagacacagcccgcgctaccgttaacttccccgcaagtcgcaactacaatttccgcctgcggggttgcggcaacaacaataatcttgcccgtgtggacctgaggatcgacggacggaccgtcgggaccttttattaccagggcacatacccctgggaggccccaattgacaatgtttatgtcagtgcggggagtcatacagtcgaaatcactgttactgcggataacggcacatgggacgtgtatgccgactacctggtgatacagtgactcgagggggggcccggtacccaattcgccctatagtgagtcgtattacaattcactggccgtcgttttacaacgtcgtgactgggaaaaccctggcgttacccaacttaatcgccttgcagcacatccccctttcgccagctggcgtaatagcgaagaggcccgcaccgatcgcccttcccaacagttgcgcagcctgaatggcgaatggaaattgtaagcgttaatattttgttaaaattcgcgttaaatttttgttaaatcagctcattttttaaccaataggccgaaatcggcaaaatcccttataaatcaaaagaatagaccgagatagggttgagtgttgttccagtttggaacaagagtccactattaaagaacgtggactccaacgtcaaagggcgaaaaaccgtctatcagggcgatggcccactacgtgaaccatcaccctaatcaagttttttggggtcgaggtgccgtaaagcactaaatcggaaccctaaagggagcccccgatttagagcttgacggggaaagccggcgaacgtggcgagaaaggaagggaagaaagcgaaaggagcgggcgctagggcgctggcaagtgtagcggtcacgctgcgcgtaaccaccacacccgccgcgcttaatgcgccgctacagggcgcgtcaggtg

SEQ ID NO: 3126 - DNA, 5135 bp, Artificial Sequence
  Synthetic Construct, AS-126 intein modified protein encoding nucleic acids in pBluescript
gcacttttcggggaaatgtgcgcggaacccctatttgtttatttttctaaatacattcaaatatgtatccgctcatgagacaataaccctgataaatgcttcaataatattgaaaaaggaagagtatgagtattcaacatttccgtgtcgcccttattcccttttttgcggcattttgccttcctgtttttgctcacccagaaacgctggtgaaagtaaaagatgctgaagatcagttgggtgcacgagtgggttacatcgaactggatctcaacagcggtaagatccttgagagttttcgccccgaagaacgttttccaatgatgagcacttttaaagttctgctatgtggcgcggtattatcccgtattgacgccgggcaagagcaactcggtcgccgcatacactattctcagaatgacttggttgagtactcaccagtcacagaaaagcatcttacggatggcatgacagtaagagaattatgcagtgctgccataaccatgagtgataacactgcggccaacttacttctgacaacgatcggaggaccgaaggagctaaccgcttttttgcacaacatgggggatcatgtaactcgccttgatcgttgggaaccggagctgaatgaagccataccaaacgacgagcgtgacaccacgatgcctgtagcaatggcaacaacgttgcgcaaactattaactggcgaactacttactctagcttcccggcaacaattaatagactggatggaggcggataaagttgcaggaccacttctgcgctcggcccttccggctggctggtttattgctgataaatctggagccggtgagcgtgggtctcgcggtatcattgcagcactggggccagatggtaagccctcccgtatcgtagttatctacacgacggggagtcaggcaactatggatgaacgaaatagacagatcgctgagataggtgcctcactgattaagcattggtaactgtcagaccaagtttactcatatatactttagattgatttaaaacttcatttttaatttaaaaggatctaggtgaagatcctttttgataatctcatgaccaaaatcccttaacgtgagttttcgttccactgagcgtcagaccccgtagaaaagatcaaaggatcttcttgagatcctttttttctgcgcgtaatctgctgcttgcaaacaaaaaaaccaccgctaccagcggtggtttgtttgccggatcaagagctaccaactctttttccgaaggtaactggcttcagcagagcgcagataccaaatactgtccttctagtgtagccgtagttaggccaccacttcaagaactctgtagcaccgcctacatacctcgctctgctaatcctgttaccagtggctgctgccagtggcgataagtcgtgtcttaccgggttggactcaagacgatagttaccggataaggcgcagcggtcgggctgaacggggggttcgtgcacacagcccagcttggagcgaacgacctacaccgaactgagatacctacagcgtgagctatgagaaagcgccacgcttcccgaagggagaaaggcggacaggtatccggtaagcggcagggtcggaacaggagagcgcacgagggagcttccagggggaaacgcctggtatctttatagtcctgtcgggtttcgccacctctgacttgagcgtcgatttttgtgatgctcgtcaggggggcggagcctatggaaaaacgccagcaacgcggcctttttacggttcctggccttttgctggccttttgctcacatgttctttcctgcgttatcccctgattctgtggataaccgtattaccgcctttgagtgagctgataccgctcgccgcagccgaacgaccgagcgcagcgagtcagtgagcgaggaagcggaagagcgcccaatacgcaaaccgcctctccccgcgcgttggccgattcattaatgcagctggcacgacaggtttcccgactggaaagcgggcagtgagcgcaacgcaattaatgtgagttagctcactcattaggcaccccaggctttacactttatgcttccggctcgtatgttgtgtggaattgtgagcggataacaatttcacacaggaaacagcatatgcaaacaagcattactctgacatccaacgcatccggtacgtttgacggttactattacgaactctggaaggatactggcaatacaacaatgacggtctacactcaaggtcgcttttcctgccagtggtcgaacatcaataacgcgttgtttaggaccgggaagaaatacaaccagaattggcagtctcttggcacaatccggatcacgtactctgcgacttacaacccaaacgggaactcctacttgtgtatctatggctggtctaccaacccattggtcgagttctacatcgttgagtcctgggggaactggagaccgcctggtgccacgtccctgggccaagtgacaatcgatggcgggacctacgacatctataggacgacacgcgtcaaccagccttgcttctcgggggatactctcgtcgcgctgacagacgggcggtcggtttctttcgagcagctcgtggaggaggagaagcagggcaagcagaatttctgctacacaatccggcacgacggctcgattggggtggagaagatcattaatgctcgcaagacaaagactaacgccaaggttatcaaggtgacactcgacaacggcgagtctatcatttgcactcccgaccacaagttcatgctgagggatgggagctacaagtgcgccatggatctcacgctggacgattcgctcatgcctctgcatcgcaagatctcgaccacggaggactctggcatcaccattgatgggtacgagatggtgtggtccccgaggtccgacagctggctcttcacgcacctggtcgccgattggtacaaccggtggcagggcatctacattgcggaggagaagcagcattgccaccataaggacttcaataagcgcaacaataacccggataacctcatcaggctgtctcccgagaagcacctcgccctgcaccggaagcatatttcaaagacactccaccgcccagacgtggtcgagaagtgccgcaggatccatcagtcccctgagttccggcgcaagatgtcagcgaggatgcagtccccggagactcgggctatcctcagcaagcaggctcaggcccagtggcagaatgagacctacaagctgacgatgatggagtcgtggaggtctttctacgacagcaacgaggattacaggcagcagaatgctgagcagctcaacagggctcagcaggagtactgggctcaggctgagaacaggaccgctcaggctgagcgcgttaggcagcatttcgctcagaatccgggcctgcgccagcagtactcggagaacgcggtgaagcagtggaataaccccgagctcctgaagtggcggcagaagaagacaaaggagcagtggactccagagttccgcgagaagaggagggaggctctcgctcagacctactacaggaagacgctcgccgcgctgaagcaggtcgagatcgagaacgggtacctggacatttcagcctacgattcctaccgcatcagcaccaaggacaagtccctcctgcggttcgatcgcttctgcgagaggtacttcgagaatgacgagaacctcgcgcgcgaggctgtcctgaattacaaccacaggatcgtcaacattgaggcggtttccgagacgatcgacgtttacgacattgaggttccacatacgcataacttcgctctcgcttcaggggttttcgttcataattccattgtggggacagccacgttcgatcagtactggagcgtgcgcacctctaagcggacttcaggaacagtgaccgtgaccgatcacttccgcgcctgggcgaaccggggcctgaacctcggcacaatagaccaaattacattgtgcgtggagggttaccaaagctctggatcagccaacatcacccagaacaccttctctcagggctcttcttccggcagttcgggtggctcatccggctccacaacgactactcgcatcgagtgtgagaacatgtccttgtccggaccctacgttagcaggatcaccaatccctttaatggtattgcgctgtacgccaacggagacacagcccgcgctaccgttaacttccccgcaagtcgcaactacaatttccgcctgcggggttgcggcaacaacaataatcttgcccgtgtggacctgaggatcgacggacggaccgtcgggaccttttattaccagggcacatacccctgggaggccccaattgacaatgtttatgtcagtgcggggagtcatacagtcgaaatcactgttactgcggataacggcacatgggacgtgtatgccgactacctggtgatacagtgactcgagggggggcccggtacccaattcgccctatagtgagtcgtattacaattcactggccgtcgttttacaacgtcgtgactgggaaaaccctggcgttacccaacttaatcgccttgcagcacatccccctttcgccagctggcgtaatagcgaagaggcccgcaccgatcgcccttcccaacagttgcgcagcctgaatggcgaatggaaattgtaagcgttaatattttgttaaaattcgcgttaaatttttgttaaatcagctcattttttaaccaataggccgaaatcggcaaaatcccttataaatcaaaagaatagaccgagatagggttgagtgttgttccagtttggaacaagagtccactattaaagaacgtggactccaacgtcaaagggcgaaaaaccgtctatcagggcgatggcccactacgtgaaccatcaccctaatcaagttttttggggtcgaggtgccgtaaagcactaaatcggaaccctaaagggagcccccgatttagagcttgacggggaaagccggcgaacgtggcgagaaaggaagggaagaaagcgaaaggagcgggcgctagggcgctggcaagtgtagcggtcacgctgcgcgtaaccaccacacccgccgcgcttaatgcgccgctacagggcgcgtcaggtg

SEQ ID NO: 3127 - DNA, 5090 bp, Artificial Sequence
  Synthetic Construct, AS-127 intein modified protein encoding nucleic acids in pBluescript
gcacttttcggggaaatgtgcgcggaacccctatttgtttatttttctaaatacattcaaatatgtatccgctcatgagacaataaccctgataaatgcttcaataatattgaaaaaggaagagtatgagtattcaacatttccgtgtcgcccttattcccttttttgcggcattttgccttcctgtttttgctcacccagaaacgctggtgaaagtaaaagatgctgaagatcagttgggtgcacgagtgggttacatcgaactggatctcaacagcggtaagatccttgagagttttcgccccgaagaacgttttccaatgatgagcacttttaaagttctgctatgtggcgcggtattatcccgtattgacgccgggcaagagcaactcggtcgccgcatacactattctcagaatgacttggttgagtactcaccagtcacagaaaagcatcttacggatggcatgacagtaagagaattatgcagtgctgccataaccatgagtgataacactgcggccaacttacttctgacaacgatcggaggaccgaaggagctaaccgcttttttgcacaacatgggggatcatgtaactcgccttgatcgttgggaaccggagctgaatgaagccataccaaacgacgagcgtgacaccacgatgcctgtagcaatggcaacaacgttgcgcaaactattaactggcgaactacttactctagcttcccggcaacaattaatagactggatggaggcggataaagttgcaggaccacttctgcgctcggcccttccggctggctggtttattgctgataaatctggagccggtgagcgtgggtctcgcggtatcattgcagcactggggccagatggtaagccctcccgtatcgtagttatctacacgacggggagtcaggcaactatggatgaacgaaatagacagatcgctgagataggtgcctcactgattaagcattggtaactgtcagaccaagtttactcatatatactttagattgatttaaaacttcatttttaatttaaaaggatctaggtgaagatcctttttgataatctcatgaccaaaatcccttaacgtgagttttcgttccactgagcgtcagaccccgtagaaaagatcaaaggatcttcttgagatcctttttttctgcgcgtaatctgctgcttgcaaacaaaaaaaccaccgctaccagcggtggtttgtttgccggatcaagagctaccaactctttttccgaaggtaactggcttcagcagagcgcagataccaaatactgtccttctagtgtagccgtagttaggccaccacttcaagaactctgtagcaccgcctacatacctcgctctgctaatcctgttaccagtggctgctgccagtggcgataagtcgtgtcttaccgggttggactcaagacgatagttaccggataaggcgcagcggtcgggctgaacggggggttcgtgcacacagcccagcttggagcgaacgacctacaccgaactgagatacctacagcgtgagctatgagaaagcgccacgcttcccgaagggagaaaggcggacaggtatccggtaagcggcagggtcggaacaggagagcgcacgagggagcttccagggggaaacgcctggtatctttatagtcctgtcgggtttcgccacctctgacttgagcgtcgatttttgtgatgctcgtcaggggggcggagcctatggaaaaacgccagcaacgcggcctttttacggttcctggccttttgctggccttttgctcacatgttctttcctgcgttatcccctgattctgtggataaccgtattaccgcctttgagtgagctgataccgctcgccgcagccgaacgaccgagcgcagcgagtcagtgagcgaggaagcggaagagcgcccaatacgcaaaccgcctctccccgcgcgttggccgattcattaatgcagctggcacgacaggtttcccgactggaaagcgggcagtgagcgcaacgcaattaatgtgagttagctcactcattaggcaccccaggctttacactttatgcttccggctcgtatgttgtgtggaattgtgagcggataacaatttcacacaggaaacagcatatgcaaacaagcattactctgacatccaacgcatccggtacgtttgacggttactattacgaactctggaaggatactggcaatacaacaatgacggtctacactcaaggtcgcttttcctgccagtggtcgaacatcaataacgcgttgtttaggaccgggaagaaatacaaccagaattggcagtctcttggcacaatccggatcacgtactctgcgacttacaacccaaacgggaactcctacttgtgtatctatggctggtctaccaacccattggtcgagttctacatcgttgagtcctgggggaactggagaccgcctggtgccacgtccctgggccaagtgacaatcgatggcgggacctacgacatctataggacgacacgcgtcaaccagccttgcatttctatggactctatgattctgacaactgagggctacaagtcgctgcaggagattttcgagacacagggggttaaggtggacaacaaggagaaggttatcgagctgaagtacccgctcattaatcggtacggcgacgtggagtacacctcccacttcacgaagaacggggagaagccaacaaagcgcatcaagactaataagggcattgagctggttaacacatacaatcatcctctcctggtgagggaggggttcaacctgatctggaagaagagcgaggacatcgaagtgggcgatattctcgtgtcccgcgtgggcgaccaccagttcgggaacaataacactgtggagaacgaggaggaggcttacgctctgggctgcatggtcgcggattcttacctggggtcatactcccggctcagcttctcgaacgacaagaaggagatcctcgataaggtctcaaagttctggaacaccttctccaataaggaggtttactacgacacctacaaggagtccaaggggatcacgattcacctgcatgacacaaacaagactaaggagttccatgataagtacaagatcgagtacggcgtcgctaaggacaagaagatcccgaagtgcattatggagagccccgagaacatccagctggccttcgtctcgggctacctggagtgcgagtccagcatctctgagaagaacctggaggttacctctgcttcaaaggacctcctgaaggatctccagctgatcctctcgaacatcggcattgtgtctacgaataaggagaaggtggtcaagaagtacaagcacaacaagtactaccggctgatcgtcaatcgcaaggagctcattaagctcctgccgctcctgaggttcgagacgcagcagcggaagaaccagaaggagaatttcctcagcaataacacaaagatcaagtcgtcttacggcaacactattgaggggtcacgctacctcctgaagaagtacagggactccctgaatatcgataagaaggagttctccaagtacctcagccgggacaccatcacgattgatcgcctgagggaggtcatctcgctctacccggacggcgataaggagattcgcgagctgttcgagaacgttgtgaataacaatatctactaccagaaggtggagcaggtcctggagggcgagatcattcccaccttcgacgtttgcatgcctaagactcattccttcatcgccaacacaatcgtcaaccacaactccattgtggggacagccacgttcgatcagtactggagcgtgcgcacctctaagcggacttcaggaacagtgaccgtgaccgatcacttccgcgcctgggcgaaccggggcctgaacctcggcacaatagaccaaattacattgtgcgtggagggttaccaaagctctggatcagccaacatcacccagaacaccttctctcagggctcttcttccggcagttcgggtggctcatccggctccacaacgactactcgcatcgagtgtgagaacatgtccttgtccggaccctacgttagcaggatcaccaatccctttaatggtattgcgctgtacgccaacggagacacagcccgcgctaccgttaacttccccgcaagtcgcaactacaatttccgcctgcggggttgcggcaacaacaataatcttgcccgtgtggacctgaggatcgacggacggaccgtcgggaccttttattaccagggcacatacccctgggaggccccaattgacaatgtttatgtcagtgcggggagtcatacagtcgaaatcactgttactgcggataacggcacatgggacgtgtatgccgactacctggtgatacagtgactcgagggggggcccggtacccaattcgccctatagtgagtcgtattacaattcactggccgtcgttttacaacgtcgtgactgggaaaaccctggcgttacccaacttaatcgccttgcagcacatccccctttcgccagctggcgtaatagcgaagaggcccgcaccgatcgcccttcccaacagttgcgcagcctgaatggcgaatggaaattgtaagcgttaatattttgttaaaattcgcgttaaatttttgttaaatcagctcattttttaaccaataggccgaaatcggcaaaatcccttataaatcaaaagaatagaccgagatagggttgagtgttgttccagtttggaacaagagtccactattaaagaacgtggactccaacgtcaaagggcgaaaaaccgtctatcagggcgatggcccactacgtgaaccatcaccctaatcaagttttttggggtcgaggtgccgtaaagcactaaatcggaaccctaaagggagcccccgatttagagcttgacggggaaagccggcgaacgtggcgagaaaggaagggaagaaagcgaaaggagcgggcgctagggcgctggcaagtgtagcggtcacgctgcgcgtaaccaccacacccgccgcgcttaatgcgccgctacagggcgcgtcaggtg

SEQ ID NO: 3128 - DNA, 4910 bp, Artificial Sequence
  Synthetic Construct, AS-128 intein modified protein encoding nucleic acids in pBluescript
gcacttttcggggaaatgtgcgcggaacccctatttgtttatttttctaaatacattcaaatatgtatccgctcatgagacaataaccctgataaatgcttcaataatattgaaaaaggaagagtatgagtattcaacatttccgtgtcgcccttattcccttttttgcggcattttgccttcctgtttttgctcacccagaaacgctggtgaaagtaaaagatgctgaagatcagttgggtgcacgagtgggttacatcgaactggatctcaacagcggtaagatccttgagagttttcgccccgaagaacgttttccaatgatgagcacttttaaagttctgctatgtggcgcggtattatcccgtattgacgccgggcaagagcaactcggtcgccgcatacactattctcagaatgacttggttgagtactcaccagtcacagaaaagcatcttacggatggcatgacagtaagagaattatgcagtgctgccataaccatgagtgataacactgcggccaacttacttctgacaacgatcggaggaccgaaggagctaaccgcttttttgcacaacatgggggatcatgtaactcgccttgatcgttgggaaccggagctgaatgaagccataccaaacgacgagcgtgacaccacgatgcctgtagcaatggcaacaacgttgcgcaaactattaactggcgaactacttactctagcttcccggcaacaattaatagactggatggaggcggataaagttgcaggaccacttctgcgctcggcccttccggctggctggtttattgctgataaatctggagccggtgagcgtgggtctcgcggtatcattgcagcactggggccagatggtaagccctcccgtatcgtagttatctacacgacggggagtcaggcaactatggatgaacgaaatagacagatcgctgagataggtgcctcactgattaagcattggtaactgtcagaccaagtttactcatatatactttagattgatttaaaacttcatttttaatttaaaaggatctaggtgaagatcctttttgataatctcatgaccaaaatcccttaacgtgagttttcgttccactgagcgtcagaccccgtagaaaagatcaaaggatcttcttgagatcctttttttctgcgcgtaatctgctgcttgcaaacaaaaaaaccaccgctaccagcggtggtttgtttgccggatcaagagctaccaactctttttccgaaggtaactggcttcagcagagcgcagataccaaatactgtccttctagtgtagccgtagttaggccaccacttcaagaactctgtagcaccgcctacatacctcgctctgctaatcctgttaccagtggctgctgccagtggcgataagtcgtgtcttaccgggttggactcaagacgatagttaccggataaggcgcagcggtcgggctgaacggggggttcgtgcacacagcccagcttggagcgaacgacctacaccgaactgagatacctacagcgtgagctatgagaaagcgccacgcttcccgaagggagaaaggcggacaggtatccggtaagcggcagggtcggaacaggagagcgcacgagggagcttccagggggaaacgcctggtatctttatagtcctgtcgggtttcgccacctctgacttgagcgtcgatttttgtgatgctcgtcaggggggcggagcctatggaaaaacgccagcaacgcggcctttttacggttcctggccttttgctggccttttgctcacatgttctttcctgcgttatcccctgattctgtggataaccgtattaccgcctttgagtgagctgataccgctcgccgcagccgaacgaccgagcgcagcgagtcagtgagcgaggaagcggaagagcgcccaatacgcaaaccgcctctccccgcgcgttggccgattcattaatgcagctggcacgacaggtttcccgactggaaagcgggcagtgagcgcaacgcaattaatgtgagttagctcactcattaggcaccccaggctttacactttatgcttccggctcgtatgttgtgtggaattgtgagcggataacaatttcacacaggaaacagcatatgcaaacaagcattactctgacatccaacgcatccggtacgtttgacggttactattacgaactctggaaggatactggcaatacaacaatgacggtctacactcaaggtcgcttttcctgccagtggtcgaacatcaataacgcgttgtttaggaccgggaagaaatacaaccagaattggcagtctcttggcacaatccggatcacgtactctgcgacttacaacccaaacgggaactcctacttgtgtatctatggctggtctaccaacccattggtcgagttctacatcgttgagtcctgggggaactggagaccgcctggtgccacgtccctgggccaagtgacaatcgatggcgggacctacgacatctataggacgacacgcgtcaaccagccttgccatcctgcggacactaaggtcatcgtgaagggcaagggcatcgttaatatctcggacgtgaaggagggggactacattctcggcatcgacggctggcagcgggtcaagaaggtttggaagtaccactacgagggcaagctcatcaacattaatgggctgaagtgcacgccgaaccataaggttcccgtggtcacagagaatgacaggcagactcgcatcagggattccctcgccaagagcttcctgtcgggcaaggtcaaggggaagatcattaccacgaagctcttcgagaagatcgcggagttcgagaagaacaagccgtcggaggaggagatcctcaagggcgagctgtctgggatcattctggccgagggcaccctcctgaggaaggacatcgagtacttcgattccagccgggggaagaagcgcattagccaccagtaccgggtggagatcacgattggcgagaacgagaaggagctcctggagcggatcctctacattttcgacaagctgttcggcatccgcccatcggtgaagaagaagggggataccaacgcgctcaagatcacaactgctaagaaggccgtctacctgcagatcgaggagctcctgaagaatattgagtcactctacgcccctgcggttctgcgcggcttcttcgagagggacgctaccgtgaacaagatccgctctacgattgttgtgacccagggcacgaacaataagtggaagatcgacattgtcgcgaagctcctggattccctcggcatcccatacagccgctacgagtacaagtacattgagaatgggaaggagctcacaaagcatatcctggagattactggcagggatgggctcatcctgttccagacactcgtcggcttcatttcgtctgagaagaacgaggcgctggagaaggctatcgaggttagggagatgaaccggctcaagaacaattctttctacaatctgtcaaccttcgaggtgtcatccgagtactacaagggcgaggtctacgatctcactctggagggcaatccttactacttcgccaatggcatcctcacacataattccattgtggggacagccacgttcgatcagtactggagcgtgcgcacctctaagcggacttcaggaacagtgaccgtgaccgatcacttccgcgcctgggcgaaccggggcctgaacctcggcacaatagaccaaattacattgtgcgtggagggttaccaaagctctggatcagccaacatcacccagaacaccttctctcagggctcttcttccggcagttcgggtggctcatccggctccacaacgactactcgcatcgagtgtgagaacatgtccttgtccggaccctacgttagcaggatcaccaatccctttaatggtattgcgctgtacgccaacggagacacagcccgcgctaccgttaacttccccgcaagtcgcaactacaatttccgcctgcggggttgcggcaacaacaataatcttgcccgtgtggacctgaggatcgacggacggaccgtcgggaccttttattaccagggcacatacccctgggaggccccaattgacaatgtttatgtcagtgcggggagtcatacagtcgaaatcactgttactgcggataacggcacatgggacgtgtatgccgactacctggtgatacagtgactcgagggggggcccggtacccaattcgccctatagtgagtcgtattacaattcactggccgtcgttttacaacgtcgtgactgggaaaaccctggcgttacccaacttaatcgccttgcagcacatccccctttcgccagctggcgtaatagcgaagaggcccgcaccgatcgcccttcccaacagttgcgcagcctgaatggcgaatggaaattgtaagcgttaatattttgttaaaattcgcgttaaatttttgttaaatcagctcattttttaaccaataggccgaaatcggcaaaatcccttataaatcaaaagaatagaccgagatagggttgagtgttgttccagtttggaacaagagtccactattaaagaacgtggactccaacgtcaaagggcgaaaaaccgtctatcagggcgatggcccactacgtgaaccatcaccctaatcaagttttttggggtcgaggtgccgtaaagcactaaatcggaaccctaaagggagcccccgatttagagcttgacggggaaagccggcgaacgtggcgagaaaggaagggaagaaagcgaaaggagcgggcgctagggcgctggcaagtgtagcggtcacgctgcgcgtaaccaccacacccgccgcgcttaatgcgccgctacagggcgcgtcaggtg

SEQ ID NO: 3129 - DNA, 5444 bp, Artificial Sequence
  Synthetic Construct, AS-129 intein modified protein encoding nucleic acids in pBluescript
gcacttttcggggaaatgtgcgcggaacccctatttgtttatttttctaaatacattcaaatatgtatccgctcatgagacaataaccctgataaatgcttcaataatattgaaaaaggaagagtatgagtattcaacatttccgtgtcgcccttattcccttttttgcggcattttgccttcctgtttttgctcacccagaaacgctggtgaaagtaaaagatgctgaagatcagttgggtgcacgagtgggttacatcgaactggatctcaacagcggtaagatccttgagagttttcgccccgaagaacgttttccaatgatgagcacttttaaagttctgctatgtggcgcggtattatcccgtattgacgccgggcaagagcaactcggtcgccgcatacactattctcagaatgacttggttgagtactcaccagtcacagaaaagcatcttacggatggcatgacagtaagagaattatgcagtgctgccataaccatgagtgataacactgcggccaacttacttctgacaacgatcggaggaccgaaggagctaaccgcttttttgcacaacatgggggatcatgtaactcgccttgatcgttgggaaccggagctgaatgaagccataccaaacgacgagcgtgacaccacgatgcctgtagcaatggcaacaacgttgcgcaaactattaactggcgaactacttactctagcttcccggcaacaattaatagactggatggaggcggataaagttgcaggaccacttctgcgctcggcccttccggctggctggtttattgctgataaatctggagccggtgagcgtgggtctcgcggtatcattgcagcactggggccagatggtaagccctcccgtatcgtagttatctacacgacggggagtcaggcaactatggatgaacgaaatagacagatcgctgagataggtgcctcactgattaagcattggtaactgtcagaccaagtttactcatatatactttagattgatttaaaacttcatttttaatttaaaaggatctaggtgaagatcctttttgataatctcatgaccaaaatcccttaacgtgagttttcgttccactgagcgtcagaccccgtagaaaagatcaaaggatcttcttgagatcctttttttctgcgcgtaatctgctgcttgcaaacaaaaaaaccaccgctaccagcggtggtttgtttgccggatcaagagctaccaactctttttccgaaggtaactggcttcagcagagcgcagataccaaatactgtccttctagtgtagccgtagttaggccaccacttcaagaactctgtagcaccgcctacatacctcgctctgctaatcctgttaccagtggctgctgccagtggcgataagtcgtgtcttaccgggttggactcaagacgatagttaccggataaggcgcagcggtcgggctgaacggggggttcgtgcacacagcccagcttggagcgaacgacctacaccgaactgagatacctacagcgtgagctatgagaaagcgccacgcttcccgaagggagaaaggcggacaggtatccggtaagcggcagggtcggaacaggagagcgcacgagggagcttccagggggaaacgcctggtatctttatagtcctgtcgggtttcgccacctctgacttgagcgtcgatttttgtgatgctcgtcaggggggcggagcctatggaaaaacgccagcaacgcggcctttttacggttcctggccttttgctggccttttgctcacatgttctttcctgcgttatcccctgattctgtggataaccgtattaccgcctttgagtgagctgataccgctcgccgcagccgaacgaccgagcgcagcgagtcagtgagcgaggaagcggaagagcgcccaatacgcaaaccgcctctccccgcgcgttggccgattcattaatgcagctggcacgacaggtttcccgactggaaagcgggcagtgagcgcaacgcaattaatgtgagttagctcactcattaggcaccccaggctttacactttatgcttccggctcgtatgttgtgtggaattgtgagcggataacaatttcacacaggaaacagcatatgcaaacaagcattactctgacatccaacgcatccggtacgtttgacggttactattacgaactctggaaggatactggcaatacaacaatgacggtctacactcaaggtcgcttttcctgccagtggtcgaacatcaataacgcgttgtttaggaccgggaagaaatacaaccagaattggcagtctcttggcacaatccggatcacgtactctgcgacttacaacccaaacgggaactcctacttgtgtatctatggctggtctaccaacccattggtcgagttctacatcgttgagtcctgggggaactggagaccgcctggtgccacgtccctgggccaagtgacaatcgatggcgggacctacgacatctataggacgacacgcgtcaaccagccttctatcctgcctaacgagtggctgcccatcatcgagaacggggaggtgaagttcgtgaagatcggggagttcattgatcgctacatggaggagcagaaggacaaggtgcgcacagtcgataacactgaggttctggaggtggacaatatcttcgccttctccctgaacaaggagtctaagaagtcagagatcaagaaggtgaaggccctcattcgccacaagtacaagggcgaggcgtacgaggtcgagctcaactccggccgcaagatccacattacaagggggcattctctcttcactatcaggaacggcaagatcaaggagatttggggcgaggaggttaaggtcggggacctcatcattgttccgaagaaggtgaagctgaatgagaaggaggctgtgatcaacattccagagctgatctctaagctccctgacgaggatacagccgacgtggtcatgaccacgcccgtcaagggcaggaagaatttcttcaaggggatgctccggaccctgaagtggatcttcggcgaggagtcaaagcggattcgcacgttcaacaggtacctcttccatctggaggagctcggcttcgtgaagctcctgccgaggggctacgaggtcaccgactgggagggcctgaagaggtaccggcagctgtacgagaagctcgtgaagaatctgcgctacaacggcaataagcgggagtacctggttcgcttcaacgacatcaaggattcagtgtcctgcttcccccgcaaggagctggaggagtggaagatcggcacaaggaaggggttccgcaggaagtgcattctcaaggttgacgaggatttcggcaagttcctggggtactacgtctcggagggctacgctggggctcagaagaacaagactggcgggatgagctactcggtcaagctctacaacgagaatccaaacgttctgaaggacatgaagaatatcgcggagaagttcttcggcaaggtccgggttgggaagaactgcgtggatattcctaagaagatggcttacctcctggctaagagcctgtgcggcgtcaccgctgagaacaagaggatcccgtcgatcattttcgactccagcgagcccgtgaggtgggcgttcctcagggcttacttcgtcggcgacggggatattcacccatccaagcgcctcaggctgtccacgaagagcgagctcctggccaatcagctcgtcttcctcctgaactcactgggcgtttcgtctatcaagattggcttcgactccggggtctaccgggtttacatcaacgaggatctgcctttcctccagacctcccgccagaagaatacgtactacccgaacctcatccccaaggaggtgctggaggagattttcggccgcaagttccagaagaacatcacgttcgagaagttcaaggagctcgcggacagcgggaagctggataagaggaaggtgaagctcctggacttcctcctgaatggcgacatcgtcctcgatcgggtgaagaacgtcgagaagcgcgagtacgagggctacgtgtacgatctctcagtggaggataatgagaatttcctcgtgggcttcggcctgctctacgctcataattccattgtggggacagccacgttcgatcagtactggagcgtgcgcacctctaagcggacttcaggaacagtgaccgtgaccgatcacttccgcgcctgggcgaaccggggcctgaacctcggcacaatagaccaaattacattgtgcgtggagggttaccaaagctctggatcagccaacatcacccagaacaccttctctcagggctcttcttccggcagttcgggtggctcatccggctccacaacgactactcgcatcgagtgtgagaacatgtccttgtccggaccctacgttagcaggatcaccaatccctttaatggtattgcgctgtacgccaacggagacacagcccgcgctaccgttaacttccccgcaagtcgcaactacaatttccgcctgcggggttgcggcaacaacaataatcttgcccgtgtggacctgaggatcgacggacggaccgtcgggaccttttattaccagggcacatacccctgggaggccccaattgacaatgtttatgtcagtgcggggagtcatacagtcgaaatcactgttactgcggataacggcacatgggacgtgtatgccgactacctggtgatacagtgactcgagggggggcccggtacccaattcgccctatagtgagtcgtattacaattcactggccgtcgttttacaacgtcgtgactgggaaaaccctggcgttacccaacttaatcgccttgcagcacatccccctttcgccagctggcgtaatagcgaagaggcccgcaccgatcgcccttcccaacagttgcgcagcctgaatggcgaatggaaattgtaagcgttaatattttgttaaaattcgcgttaaatttttgttaaatcagctcattttttaaccaataggccgaaatcggcaaaatcccttataaatcaaaagaatagaccgagatagggttgagtgttgttccagtttggaacaagagtccactattaaagaacgtggactccaacgtcaaagggcgaaaaaccgtctatcagggcgatggcccactacgtgaaccatcaccctaatcaagttttttggggtcgaggtgccgtaaagcactaaatcggaaccctaaagggagcccccgatttagagcttgacggggaaagccggcgaacgtggcgagaaaggaagggaagaaagcgaaaggagcgggcgctagggcgctggcaagtgtagcggtcacgctgcgcgtaaccaccacacccgccgcgcttaatgcgccgctacagggcgcgtcaggtg

SEQ ID NO: 3130 - DNA, 9788 bp, Artificial Sequence
  Synthetic Construct, AS-130 intein modified protein encoding nucleic acids in pBluescript
gcacttttcggggaaatgtgcgcggaacccctatttgtttatttttctaaatacattcaaatatgtatccgctcatgagacaataaccctgataaatgcttcaataatattgaaaaaggaagagtatgagtattcaacatttccgtgtcgcccttattcccttttttgcggcattttgccttcctgtttttgctcacccagaaacgctggtgaaagtaaaagatgctgaagatcagttgggtgcacgagtgggttacatcgaactggatctcaacagcggtaagatccttgagagttttcgccccgaagaacgttttccaatgatgagcacttttaaagttctgctatgtggcgcggtattatcccgtattgacgccgggcaagagcaactcggtcgccgcatacactattctcagaatgacttggttgagtactcaccagtcacagaaaagcatcttacggatggcatgacagtaagagaattatgcagtgctgccataaccatgagtgataacactgcggccaacttacttctgacaacgatcggaggaccgaaggagctaaccgcttttttgcacaacatgggggatcatgtaactcgccttgatcgttgggaaccggagctgaatgaagccataccaaacgacgagcgtgacaccacgatgcctgtagcaatggcaacaacgttgcgcaaactattaactggcgaactacttactctagcttcccggcaacaattaatagactggatggaggcggataaagttgcaggaccacttctgcgctcggcccttccggctggctggtttattgctgataaatctggagccggtgagcgtgggtctcgcggtatcattgcagcactggggccagatggtaagccctcccgtatcgtagttatctacacgacggggagtcaggcaactatggatgaacgaaatagacagatcgctgagataggtgcctcactgattaagcattggtaactgtcagaccaagtttactcatatatactttagattgatttaaaacttcatttttaatttaaaaggatctaggtgaagatcctttttgataatctcatgaccaaaatcccttaacgtgagttttcgttccactgagcgtcagaccccgtagaaaagatcaaaggatcttcttgagatcctttttttctgcgcgtaatctgctgcttgcaaacaaaaaaaccaccgctaccagcggtggtttgtttgccggatcaagagctaccaactctttttccgaaggtaactggcttcagcagagcgcagataccaaatactgtccttctagtgtagccgtagttaggccaccacttcaagaactctgtagcaccgcctacatacctcgctctgctaatcctgttaccagtggctgctgccagtggcgataagtcgtgtcttaccgggttggactcaagacgatagttaccggataaggcgcagcggtcgggctgaacggggggttcgtgcacacagcccagcttggagcgaacgacctacaccgaactgagatacctacagcgtgagctatgagaaagcgccacgcttcccgaagggagaaaggcggacaggtatccggtaagcggcagggtcggaacaggagagcgcacgagggagcttccagggggaaacgcctggtatctttatagtcctgtcgggtttcgccacctctgacttgagcgtcgatttttgtgatgctcgtcaggggggcggagcctatggaaaaacgccagcaacgcggcctttttacggttcctggccttttgctggccttttgctcacatgttctttcctgcgttatcccctgattctgtggataaccgtattaccgcctttgagtgagctgataccgctcgccgcagccgaacgaccgagcgcagcgagtcagtgagcgaggaagcggaagagcgcccaatacgcaaaccgcctctccccgcgcgttggccgattcattaatgcagctggcacgacaggtttcccgactggaaagcgggcagtgagcgcaacgcaattaatgtgagttagctcactcattaggcaccccaggctttacactttatgcttccggctcgtatgttgtgtggaattgtgagcggataacaatttcacacaggaaacagcatatgcaaacaagcattactctgacatccaacgcatccggtacgtttgacggttactattacgaactctggaaggatactggcaatacaacaatgacggtctacactcaaggtcgcttttcctgccagtggtcgaacatcaataacgcgttgtttaggaccgggaagaaatacaaccagaattggcagtctcttggcacaatccggatcacgtactctgcgacttacaacccaaacgggaactcctacttgtgtatctatggctggtctaccaacccattggtcgagttctacatcgttgagtcctgggggaactggagaccgcctggtgccacgtccctgggccaagtgacaatcgatggcgggacctacgacatctataggacgacacgcgtcaaccagccttgcgcggcctacgatactctcgtgctgcagaaggacgggtcgctggttacgctggcggaggtttacaagcggcaggagattgagctgctcacactgggcaagaacagcaagttctacctcactaagccatcggccttcattgacgatggcatcaagcctattttccgcgtcaccacgaagctcgggaggttcgtggagacaactatcacccacccgttcctgaccgtgaacggctggaagcccctcagcaagctgcaggtcggggagaagattgccgtgccccgcaggctcaacattttcgggaatgagaccatctcggagtctaagttctccagcctgatcaacttcgacaatctctacctgttcccgctcgtgttccagctggagcggtcgcagctcgcgctgttcattcgctacctcttcagcctggatggctgggtgaagatctaccagaacaagatcgtctgcttcgggtactcaaccgtgtccgagaagctgatcaggcagattcagcacatcctcctgcggttcggcattgtctccgggatcgagaagttcgaggagaagcggacggagaagatcaaggtggtcaaggaggtgaagagccagcggtcgcaccgcgaggagttcacattcgctacttaccgcaactgctactgcgacggcaagtggcacctcaccattacggatgccctctcccagaagaacctgatggaggacatcggcgggttcgatagcaagaacttctacctgttcgacctcctgcagccgcacaacagcggcaatcaggagctggagaaccatctgatcttctgggatgagctcgttaatgtgctggcgaagttcgccgcgtctaagaaccagtcactcaagaatcgcaccgctaaggggaagtcccccaagaacagcgagaatctgaccacgacagagacgatttgcaggaagaacatcctcgccaacatggagaatctgccgagcgacaaccagaatttcgattcggagaagctcgacctgtctcagccccacaactcagggaaccaggagctggagaatcatctgatcttctgggacgagctcgtcaatgttctggccaagttcgcgacctcgaagaaccagtctctcaagaataggactaccaagcggaactcaccgaagaactccgagaatctgacgacaactgagaccatctgcaggaagaacattctggcgaacatggagaatctgccctctgataaccagaatttcgactcagagaagctcgatctgccgcagccccacaactccgggaatcaagaactggagaatcatctgatcttctgggacgaactcgtgaatgtcctggctaagttcgctgccagcaagaaccagtcgctcaagaatcgcaccacgaagaggaactctccaaagaactcagagaatctgacaactaccgagaccatttgccggaagaacattctggctaatatggagaatctgccttctgacaatcagaatttcgatagcgagaagctcgacctgccacagcctcataattccgggaatcaagagctggagaatcatctgatcttctgggacgaattagttaacgtgctggctaagttcgccacatccaagaaccagagcctcaagaaccggacgacaaagcgcaactcgccgaagaactctgagaatctgactaccacggagactatttgccgcaagaacattctggctaacatggagaatctgccatcggacaatcagaatttcgactctgagaagctcgatctgtcccagcctcacaacagcggcactcaggaactggagaaccatctgatcttctgggacgaactagtcaacgtcctcgccaagttcgcggcttcaaagaaccagtccctcaagaatcggacagcgaaggggaagagcccgaagaactcggagaatctgaccaccaccgagaccatctgccgcaagaacatcctcgcgaacatggaaaatctgccgtcagataatcagaatttcgattccgagaagctcgacctgtcgcagccccacaactctgggaatcaggaactggagaatcatctgatcttctgggacgaactggtgaacgtcctggcgaagttcgctacctctaagaaccagtccctgaagaataggacgacaaagcggaactccccgaagaacagcgaaaatctgaccactacggagaccatttgcaggaagaacattctcgcgaatatggagaatctgcccagcgataatcagaacttcgactcggagaagctggatctgcctcagccccacaactctggcaaccaagaactggagaaccatctgatcttctgggacgaacttgttaacgtgctggccaagttcgcgacatcgaagaaccaatccctgaaaaatcgcacaactaagaggaactcaccaaagaactccgaaaatctgactaccacagagactatttgccggaagaacatcctggccaatatggagaatctgccgtctgacaaccagaacttcgactccgagaagctggacctgccacagcctcacaacagcgggaatcaggagctggagaatcatctgatcttctgggacgaactagtaaacgttctggctaagttcgccactagcaagaaccaatccctcaagaatcggactaccaagcgcaactctccgaagaactcagaaaatctgaccaccactgagactatctgcaggaagaacatcctggcgaatatggaaaatctgccctccgataatcagaatttcgactccgagaagctcgatctgcctcagccgcataactctgggaatcaggagctggagaaccatctgatcttctgggacgaactagtgaatgtgctcgccaagttcgctacctccaagaaccaatccttaaagaataggaccacgaagcggaactcgccaaagaactctgaaaatctgaccacaaccgagaccatttgccgcaagaacatcctggccaacatggaaaatctgccttcggataatcagaacttcgattccgaaaaactggacctgccgcagccgcataattccgggaatcaggagctggagaaccatctgatcttctgggacgaactagttaatgtcctggccaagttcgcgacgtcaaagaaccagagcctgaagaatcgcacgacaaagaggaacagccctaagaactcggaaaatctgaccacaacggagacaatctgtaggaagaacattctggcaaatatggagaatctgccatcagacaatcagaacttcgacagcgagaagctcgatctgtcacagcctcacaactccggcacacaagaactggagaaccatctgatcttctgggacgaactagtaaatgttctcgccaagttcgcggcctctaagaaccaaagcctgaaaaatcggacaactaagcgcaactcccctaagaacagcgaaaatctgacaacgacagagacaatctgccgcaagaacattctcgcaaacatggaaaatctgccatctgataatcagaacttcgatagcgaaaaactggacctgccacagccacacaactccggcacgcaagaactggagaatcatctgatcttctgggacgaactagtaaacgtactggccaagttcgctgcgtcgaagaaccagtccttaaaaaaccgcaccactaagcggaactcacctaagaactccgaaaatctgaccacgactgagactatatgtaggaagaacatcttagccaacatggaaaatctgcccagcgacaatcaaaactttgactccgagaagctggatctgccgcagccgcataactccgggaatcaggagctggagaaccatctgatcttctgggacgaactagtaaacgtcctggctaagttcgccgctagcaagaaccagtccctgaaaaacaggactaccaagaggaactctcctaagaactcagaaaatctgactaccactgaaactatctgtcgcaagaacatcctggctaatatggaaaatctgccgtcggataaccagaacttcgattccgagaaactggacctgcctcagccgcacaattctggcaaccaagagctggagaaccatctgatcttctgggacgaactagtaaacgtgctcgccaagttcgccacctccaagaaccagtccctgaaaaataggaccacaaagcgcaactcgcctaagaactctgaaaatctgacaaccacggagacaatctgcaggaagaacatactcgcgaacatggagaatctgccttcggacaaccagaacttcgattcagagaagctggatctgccccagccgcataattccggcaaccaggaactggagaatcatctgatcttctgggacgaactagtaaacgtattagcgaagttcgctacctcaaagaaccaaagcctcaaaaataggacggccaaggggaagagccctaagaactcggagaatctgactaccactgagactatatgtcggaagaacatcctcgcaaacatggagaatctgcccagcgataaccagaatttcgattctgagaagctggacctgccgcagcctcataattctggtaaccaagagctggagaatcatctgatcttctgggacgaactagtaaacgtactagccaagttcgcgacctctaagaaccagagcctgaaaaaccgcaccaccaagcggaactccccaaagaacagcgaaaatctgactactaccgagacgatatgtcgcaagaacattctcgctaatatggaaaatctgccatcggacaaccaaaacttcgactccgaaaaactcgatctgccgcagccgcacaattccggtaaccaggagctggagaaccatctgatcttctgggacgaactagtaaacgtactcgctaagttcgccacttcgaagaaccagtcccttaaaaacaggaccaccaagaggaactcacccaagaactccgaaaatctgacgaccaccgaaaccatctgtaggaagaacatactggctaatatggaaaatctgccttctgacaaccagaatttcgacagtgaaaaactggacctgccccagccgcataactctggtaaccaagagctggagaatcatctgatcttctgggacgaactagtaaacgtacttgcgaagttcgctacaagcaagaaccagtccctcaaaaatcgcactgccaaggggaagtctccgaagaactcagagaatctgaccacgaccgagactatttgtaggaagaacatcctggccaacatggagaatctgcccagtgacaatcaaaactttgatagcgaaaaactggatctgccgcagccacacaactccgggaatcaggagctggagaaccacctgatcttctgggatgaactggttaacgttctcgcgaagttcgccacttccaagaaccagtccctcaaaaacaggaccactaagcgcaactcgccaaagaactctgagaatctgacgaccacagagacgatatgccgcaagaacattttagcgaatatggaaaatctgcccagcgacaatcagaactttgactccgaaaagctggacctgcctcagcctcataattctggaaaccaagaactggagaaccacctgatcttctgggacgaactagtaaacgtactagcaaagttcgccacctcaaagaaccagagcctgaaaaatcgcaccacaaagcggaacagcccaaagaactcggaaaatctgactactactgagacgatttgtcgcaagaacattttggcgaatatggagaatctgccaagcgataatcaaaacttcgattctgaaaaactcgatctgcctcagccacataattccggcacccaggagctggagaactccgacatcttctgggataagattgtgtccatcgagccggtcggggagaagcaggtgtacgatctcactgttccagagactcataacttcgttgctaatgatatttgcctccataattccattgtggggacagccacgttcgatcagtactggagcgtgcgcacctctaagcggacttcaggaacagtgaccgtgaccgatcacttccgcgcctgggcgaaccggggcctgaacctcggcacaatagaccaaattacattgtgcgtggagggttaccaaagctctggatcagccaacatcacccagaacaccttctctcagggctcttcttccggcagttcgggtggctcatccggctccacaacgactactcgcatcgagtgtgagaacatgtccttgtccggaccctacgttagcaggatcaccaatccctttaatggtattgcgctgtacgccaacggagacacagcccgcgctaccgttaacttccccgcaagtcgcaactacaatttccgcctgcggggttgcggcaacaacaataatcttgcccgtgtggacctgaggatcgacggacggaccgtcgggaccttttattaccagggcacatacccctgggaggccccaattgacaatgtttatgtcagtgcggggagtcatacagtcgaaatcactgttactgcggataacggcacatgggacgtgtatgccgactacctggtgatacagtgactcgagggggggcccggtacccaattcgccctatagtgagtcgtattacaattcactggccgtcgttttacaacgtcgtgactgggaaaaccctggcgttacccaacttaatcgccttgcagcacatccccctttcgccagctggcgtaatagcgaagaggcccgcaccgatcgcccttcccaacagttgcgcagcctgaatggcgaatggaaattgtaagcgttaatattttgttaaaattcgcgttaaatttttgttaaatcagctcattttttaaccaataggccgaaatcggcaaaatcccttataaatcaaaagaatagaccgagatagggttgagtgttgttccagtttggaacaagagtccactattaaagaacgtggactccaacgtcaaagggcgaaaaaccgtctatcagggcgatggcccactacgtgaaccatcaccctaatcaagttttttggggtcgaggtgccgtaaagcactaaatcggaaccctaaagggagcccccgatttagagcttgacggggaaagccggcgaacgtggcgagaaaggaagggaagaaagcgaaaggagcgggcgctagggcgctggcaagtgtagcggtcacgctgcgcgtaaccaccacacccgccgcgcttaatgcgccgctacagggcgcgtcaggtg

SEQ ID NO: 3131 - DNA, 5114 bp, Artificial Sequence
  Synthetic Construct, AS-131 intein modified protein encoding nucleic acids in pBluescript
gcacttttcggggaaatgtgcgcggaacccctatttgtttatttttctaaatacattcaaatatgtatccgctcatgagacaataaccctgataaatgcttcaataatattgaaaaaggaagagtatgagtattcaacatttccgtgtcgcccttattcccttttttgcggcattttgccttcctgtttttgctcacccagaaacgctggtgaaagtaaaagatgctgaagatcagttgggtgcacgagtgggttacatcgaactggatctcaacagcggtaagatccttgagagttttcgccccgaagaacgttttccaatgatgagcacttttaaagttctgctatgtggcgcggtattatcccgtattgacgccgggcaagagcaactcggtcgccgcatacactattctcagaatgacttggttgagtactcaccagtcacagaaaagcatcttacggatggcatgacagtaagagaattatgcagtgctgccataaccatgagtgataacactgcggccaacttacttctgacaacgatcggaggaccgaaggagctaaccgcttttttgcacaacatgggggatcatgtaactcgccttgatcgttgggaaccggagctgaatgaagccataccaaacgacgagcgtgacaccacgatgcctgtagcaatggcaacaacgttgcgcaaactattaactggcgaactacttactctagcttcccggcaacaattaatagactggatggaggcggataaagttgcaggaccacttctgcgctcggcccttccggctggctggtttattgctgataaatctggagccggtgagcgtgggtctcgcggtatcattgcagcactggggccagatggtaagccctcccgtatcgtagttatctacacgacggggagtcaggcaactatggatgaacgaaatagacagatcgctgagataggtgcctcactgattaagcattggtaactgtcagaccaagtttactcatatatactttagattgatttaaaacttcatttttaatttaaaaggatctaggtgaagatcctttttgataatctcatgaccaaaatcccttaacgtgagttttcgttccactgagcgtcagaccccgtagaaaagatcaaaggatcttcttgagatcctttttttctgcgcgtaatctgctgcttgcaaacaaaaaaaccaccgctaccagcggtggtttgtttgccggatcaagagctaccaactctttttccgaaggtaactggcttcagcagagcgcagataccaaatactgtccttctagtgtagccgtagttaggccaccacttcaagaactctgtagcaccgcctacatacctcgctctgctaatcctgttaccagtggctgctgccagtggcgataagtcgtgtcttaccgggttggactcaagacgatagttaccggataaggcgcagcggtcgggctgaacggggggttcgtgcacacagcccagcttggagcgaacgacctacaccgaactgagatacctacagcgtgagctatgagaaagcgccacgcttcccgaagggagaaaggcggacaggtatccggtaagcggcagggtcggaacaggagagcgcacgagggagcttccagggggaaacgcctggtatctttatagtcctgtcgggtttcgccacctctgacttgagcgtcgatttttgtgatgctcgtcaggggggcggagcctatggaaaaacgccagcaacgcggcctttttacggttcctggccttttgctggccttttgctcacatgttctttcctgcgttatcccctgattctgtggataaccgtattaccgcctttgagtgagctgataccgctcgccgcagccgaacgaccgagcgcagcgagtcagtgagcgaggaagcggaagagcgcccaatacgcaaaccgcctctccccgcgcgttggccgattcattaatgcagctggcacgacaggtttcccgactggaaagcgggcagtgagcgcaacgcaattaatgtgagttagctcactcattaggcaccccaggctttacactttatgcttccggctcgtatgttgtgtggaattgtgagcggataacaatttcacacaggaaacagcatatgcaaacaagcattactctgacatccaacgcatccggtacgtttgacggttactattacgaactctggaaggatactggcaatacaacaatgacggtctacactcaaggtcgcttttcctgccagtggtcgaacatcaataacgcgttgtttaggaccgggaagaaatacaaccagaattggcagtctcttggcacaatccggatcacgtactctgcgacttacaacccaaacgggaactcctacttgtgtatctatggctggtctaccaacccattggtcgagttctacatcgttgagtcctgggggaactggagaccgcctggtgccacgtccctgggccaagtgacaatcgatggcgggacctacgacatctataggacgacacgcgtcaaccagccttgcctctcggggtctacaaaggtcattgacgctgctacggggaatctcttctcgctcaaggagatcgccgctcagcctgagtactggctctcgcgcaaggtcttctctctcgacctgaagtcacagcaggtggtccagcagccaatcaccgagattcaccctaatggcgtgagggatgtctggcagatcaccacgaggaccaacaggaaggtgtgcgctacggacgatcatctcttctacacagtcctgggctggaagccgctcaaggacttcagcgttggcgatcgcctcgggctgccgaataagatccccattaactacaggtcccagatctccgacagcaaggtgaagttcacggcgtacctcattggcgaggggtacctgtacacaaattcgttctcttgctcatacttctgcaactccgacggggagctcatcgcggatttctacggctgcgctgaggagctgttcgggtccagcgctccaatcgagaagcagctccacctgggcaataagtccgtgatctacgtgcggatcggcctcatttccgggctgaagaactgggtcgactcctacctccagtgcgcgaatagccgcgtgcaggagatccccaactggattttctccctcagccagtcgcagctccagctgttcctcggcatcctgtggtctacgtcagggatcttcgacgagacaattggctacacttactactcgtctaacagcgaggtcctggttaggcaggtccagcatctgttcctccggctgggcatcgtttccctcttcaacgtcaataaggttaagggccagggggagctggacgtgtcctacgttgtggaggtccgcgggagggaggatatgctgaagttctacaagctcatcaagccgtacctgtcatcctacaagcagggcctctgcgagagctgctacctggtcattaagtaccagcagtcgtaccagttcaagtacttcctcactcccgacttcttcgatctgatcgtgaaggctaagaaggccagctcgatgaccagggctctcggcgtttgcggcggggagatctcttcagtgtggaacttccagaatacatctaaccggtccctgagcttcgacaagttcaacaatttctcgactgtcctcgcggatgaggagctgaccgccatcgcgaactcggacgtgttctgggatgagatcatttctatcgagtacattggcaaggaggaggtgttcgatctcactattccagagactcataacttcattgctaatgacttcatcgtgcataattccattgtggggacagccacgttcgatcagtactggagcgtgcgcacctctaagcggacttcaggaacagtgaccgtgaccgatcacttccgcgcctgggcgaaccggggcctgaacctcggcacaatagaccaaattacattgtgcgtggagggttaccaaagctctggatcagccaacatcacccagaacaccttctctcagggctcttcttccggcagttcgggtggctcatccggctccacaacgactactcgcatcgagtgtgagaacatgtccttgtccggaccctacgttagcaggatcaccaatccctttaatggtattgcgctgtacgccaacggagacacagcccgcgctaccgttaacttccccgcaagtcgcaactacaatttccgcctgcggggttgcggcaacaacaataatcttgcccgtgtggacctgaggatcgacggacggaccgtcgggaccttttattaccagggcacatacccctgggaggccccaattgacaatgtttatgtcagtgcggggagtcatacagtcgaaatcactgttactgcggataacggcacatgggacgtgtatgccgactacctggtgatacagtgactcgagggggggcccggtacccaattcgccctatagtgagtcgtattacaattcactggccgtcgttttacaacgtcgtgactgggaaaaccctggcgttacccaacttaatcgccttgcagcacatccccctttcgccagctggcgtaatagcgaagaggcccgcaccgatcgcccttcccaacagttgcgcagcctgaatggcgaatggaaattgtaagcgttaatattttgttaaaattcgcgttaaatttttgttaaatcagctcattttttaaccaataggccgaaatcggcaaaatcccttataaatcaaaagaatagaccgagatagggttgagtgttgttccagtttggaacaagagtccactattaaagaacgtggactccaacgtcaaagggcgaaaaaccgtctatcagggcgatggcccactacgtgaaccatcaccctaatcaagttttttggggtcgaggtgccgtaaagcactaaatcggaaccctaaagggagcccccgatttagagcttgacggggaaagccggcgaacgtggcgagaaaggaagggaagaaagcgaaaggagcgggcgctagggcgctggcaagtgtagcggtcacgctgcgcgtaaccaccacacccgccgcgcttaatgcgccgctacagggcgcgtcaggtg

SEQ ID NO: 3132 - DNA, 4241 bp, Artificial Sequence
  Synthetic Construct, AS-132 intein modified protein encoding nucleic acids in pBluescript
gcacttttcggggaaatgtgcgcggaacccctatttgtttatttttctaaatacattcaaatatgtatccgctcatgagacaataaccctgataaatgcttcaataatattgaaaaaggaagagtatgagtattcaacatttccgtgtcgcccttattcccttttttgcggcattttgccttcctgtttttgctcacccagaaacgctggtgaaagtaaaagatgctgaagatcagttgggtgcacgagtgggttacatcgaactggatctcaacagcggtaagatccttgagagttttcgccccgaagaacgttttccaatgatgagcacttttaaagttctgctatgtggcgcggtattatcccgtattgacgccgggcaagagcaactcggtcgccgcatacactattctcagaatgacttggttgagtactcaccagtcacagaaaagcatcttacggatggcatgacagtaagagaattatgcagtgctgccataaccatgagtgataacactgcggccaacttacttctgacaacgatcggaggaccgaaggagctaaccgcttttttgcacaacatgggggatcatgtaactcgccttgatcgttgggaaccggagctgaatgaagccataccaaacgacgagcgtgacaccacgatgcctgtagcaatggcaacaacgttgcgcaaactattaactggcgaactacttactctagcttcccggcaacaattaatagactggatggaggcggataaagttgcaggaccacttctgcgctcggcccttccggctggctggtttattgctgataaatctggagccggtgagcgtgggtctcgcggtatcattgcagcactggggccagatggtaagccctcccgtatcgtagttatctacacgacggggagtcaggcaactatggatgaacgaaatagacagatcgctgagataggtgcctcactgattaagcattggtaactgtcagaccaagtttactcatatatactttagattgatttaaaacttcatttttaatttaaaaggatctaggtgaagatcctttttgataatctcatgaccaaaatcccttaacgtgagttttcgttccactgagcgtcagaccccgtagaaaagatcaaaggatcttcttgagatcctttttttctgcgcgtaatctgctgcttgcaaacaaaaaaaccaccgctaccagcggtggtttgtttgccggatcaagagctaccaactctttttccgaaggtaactggcttcagcagagcgcagataccaaatactgtccttctagtgtagccgtagttaggccaccacttcaagaactctgtagcaccgcctacatacctcgctctgctaatcctgttaccagtggctgctgccagtggcgataagtcgtgtcttaccgggttggactcaagacgatagttaccggataaggcgcagcggtcgggctgaacggggggttcgtgcacacagcccagcttggagcgaacgacctacaccgaactgagatacctacagcgtgagctatgagaaagcgccacgcttcccgaagggagaaaggcggacaggtatccggtaagcggcagggtcggaacaggagagcgcacgagggagcttccagggggaaacgcctggtatctttatagtcctgtcgggtttcgccacctctgacttgagcgtcgatttttgtgatgctcgtcaggggggcggagcctatggaaaaacgccagcaacgcggcctttttacggttcctggccttttgctggccttttgctcacatgttctttcctgcgttatcccctgattctgtggataaccgtattaccgcctttgagtgagctgataccgctcgccgcagccgaacgaccgagcgcagcgagtcagtgagcgaggaagcggaagagcgcccaatacgcaaaccgcctctccccgcgcgttggccgattcattaatgcagctggcacgacaggtttcccgactggaaagcgggcagtgagcgcaacgcaattaatgtgagttagctcactcattaggcaccccaggctttacactttatgcttccggctcgtatgttgtgtggaattgtgagcggataacaatttcacacaggaaacagcatatgcaaacaagcattactctgacatccaacgcatccggtacgtttgacggttactattacgaactctggaaggatactggcaatacaacaatgacggtctacactcaaggtcgcttttcctgccagtggtcgaacatcaataacgcgttgtttaggaccgggaagaaatacaaccagaattggcagtctcttggcacaatccggatcacgtactctgcgacttacaacccaaacgggaactcctacttgtgtatctatggctggtctaccaacccattggtcgagttctacatcgttgagtcctgggggaactggagaccgcctggtgccacgtccctgggccaagtgacaatcgatggcgggacctacgacatctataggacgacacgcgtcaaccagccttgcctgacttacgagacagagattatgacagtggagtacgggccgctgcctatcgggaagatcgtggagtaccgcattgagtgcacggtgtacacagtcgacaagaacggctacatctacactcagccgattgcccagtggcacaatcgcggcatgcaggaggtctacgagtactccctggaggatgggaccgttatcagggcgacgccggagcataagttcatgaccgaggacggccagatgctgcccatcgatgagattttcgagcggaacctcgacctgaagtgcctcgggaccctggagatggttaagattgtgagccgcaagctcgctaagacggagaatgtgtacgatattggggttacaaaggatcacaacttcgtgctcgctaatgggctcattgcttccaactccattgtggggacagccacgttcgatcagtactggagcgtgcgcacctctaagcggacttcaggaacagtgaccgtgaccgatcacttccgcgcctgggcgaaccggggcctgaacctcggcacaatagaccaaattacattgtgcgtggagggttaccaaagctctggatcagccaacatcacccagaacaccttctctcagggctcttcttccggcagttcgggtggctcatccggctccacaacgactactcgcatcgagtgtgagaacatgtccttgtccggaccctacgttagcaggatcaccaatccctttaatggtattgcgctgtacgccaacggagacacagcccgcgctaccgttaacttccccgcaagtcgcaactacaatttccgcctgcggggttgcggcaacaacaataatcttgcccgtgtggacctgaggatcgacggacggaccgtcgggaccttttattaccagggcacatacccctgggaggccccaattgacaatgtttatgtcagtgcggggagtcatacagtcgaaatcactgttactgcggataacggcacatgggacgtgtatgccgactacctggtgatacagtgactcgagggggggcccggtacccaattcgccctatagtgagtcgtattacaattcactggccgtcgttttacaacgtcgtgactgggaaaaccctggcgttacccaacttaatcgccttgcagcacatccccctttcgccagctggcgtaatagcgaagaggcccgcaccgatcgcccttcccaacagttgcgcagcctgaatggcgaatggaaattgtaagcgttaatattttgttaaaattcgcgttaaatttttgttaaatcagctcattttttaaccaataggccgaaatcggcaaaatcccttataaatcaaaagaatagaccgagatagggttgagtgttgttccagtttggaacaagagtccactattaaagaacgtggactccaacgtcaaagggcgaaaaaccgtctatcagggcgatggcccactacgtgaaccatcaccctaatcaagttttttggggtcgaggtgccgtaaagcactaaatcggaaccctaaagggagcccccgatttagagcttgacggggaaagccggcgaacgtggcgagaaaggaagggaagaaagcgaaaggagcgggcgctagggcgctggcaagtgtagcggtcacgctgcgcgtaaccaccacacccgccgcgcttaatgcgccgctacagggcgcgtcaggtg

SEQ ID NO: 3133 - DNA, 5120 bp, Artificial Sequence
  Synthetic Construct, AS-133 intein modified protein encoding nucleic acids in pBluescript
gcacttttcggggaaatgtgcgcggaacccctatttgtttatttttctaaatacattcaaatatgtatccgctcatgagacaataaccctgataaatgcttcaataatattgaaaaaggaagagtatgagtattcaacatttccgtgtcgcccttattcccttttttgcggcattttgccttcctgtttttgctcacccagaaacgctggtgaaagtaaaagatgctgaagatcagttgggtgcacgagtgggttacatcgaactggatctcaacagcggtaagatccttgagagttttcgccccgaagaacgttttccaatgatgagcacttttaaagttctgctatgtggcgcggtattatcccgtattgacgccgggcaagagcaactcggtcgccgcatacactattctcagaatgacttggttgagtactcaccagtcacagaaaagcatcttacggatggcatgacagtaagagaattatgcagtgctgccataaccatgagtgataacactgcggccaacttacttctgacaacgatcggaggaccgaaggagctaaccgcttttttgcacaacatgggggatcatgtaactcgccttgatcgttgggaaccggagctgaatgaagccataccaaacgacgagcgtgacaccacgatgcctgtagcaatggcaacaacgttgcgcaaactattaactggcgaactacttactctagcttcccggcaacaattaatagactggatggaggcggataaagttgcaggaccacttctgcgctcggcccttccggctggctggtttattgctgataaatctggagccggtgagcgtgggtctcgcggtatcattgcagcactggggccagatggtaagccctcccgtatcgtagttatctacacgacggggagtcaggcaactatggatgaacgaaatagacagatcgctgagataggtgcctcactgattaagcattggtaactgtcagaccaagtttactcatatatactttagattgatttaaaacttcatttttaatttaaaaggatctaggtgaagatcctttttgataatctcatgaccaaaatcccttaacgtgagttttcgttccactgagcgtcagaccccgtagaaaagatcaaaggatcttcttgagatcctttttttctgcgcgtaatctgctgcttgcaaacaaaaaaaccaccgctaccagcggtggtttgtttgccggatcaagagctaccaactctttttccgaaggtaactggcttcagcagagcgcagataccaaatactgtccttctagtgtagccgtagttaggccaccacttcaagaactctgtagcaccgcctacatacctcgctctgctaatcctgttaccagtggctgctgccagtggcgataagtcgtgtcttaccgggttggactcaagacgatagttaccggataaggcgcagcggtcgggctgaacggggggttcgtgcacacagcccagcttggagcgaacgacctacaccgaactgagatacctacagcgtgagctatgagaaagcgccacgcttcccgaagggagaaaggcggacaggtatccggtaagcggcagggtcggaacaggagagcgcacgagggagcttccagggggaaacgcctggtatctttatagtcctgtcgggtttcgccacctctgacttgagcgtcgatttttgtgatgctcgtcaggggggcggagcctatggaaaaacgccagcaacgcggcctttttacggttcctggccttttgctggccttttgctcacatgttctttcctgcgttatcccctgattctgtggataaccgtattaccgcctttgagtgagctgataccgctcgccgcagccgaacgaccgagcgcagcgagtcagtgagcgaggaagcggaagagcgcccaatacgcaaaccgcctctccccgcgcgttggccgattcattaatgcagctggcacgacaggtttcccgactggaaagcgggcagtgagcgcaacgcaattaatgtgagttagctcactcattaggcaccccaggctttacactttatgcttccggctcgtatgttgtgtggaattgtgagcggataacaatttcacacaggaaacagcatatgcaaacaagcattactctgacatccaacgcatccggtacgtttgacggttactattacgaactctggaaggatactggcaatacaacaatgacggtctacactcaaggtcgcttttcctgccagtggtcgaacatcaataacgcgttgtttaggaccgggaagaaatacaaccagaattggcagtctcttggcacaatccggatcacgtactctgcgacttacaacccaaacgggaactcctacttgtgtatctatggctggtctaccaacccattggtcgagttctacatcgttgagtcctgggggaactggagaccgcctggtgccacgtccctgggccaagtgacaatcgatggcgggacctacgacatctataggacgacacgcgtcaaccagccttcgctgacgggggatcagaaggtcctctactacatcgctaagaagctctactacgagacattcgctgagtgctacgaccgcattaacggcgacatctccagcgttagcgtgccatgcttcgatgagaactaccagacagtgattaagcctatctcggccatttggaagcaccatgtgaagaagaagggcttcaagattaagatcacttgggggaagcagattaagatcacagaggaccacagcctgttcactaggaacgagaacaataagccgcaggcggttttcggcaatgagatcaaggtcggcgatgagattgggatcccctcctacatctccttcctggagcagccgctggagcccttccatattaccgacaagattctcatccaggaggagatctacgtggagtcagaggacacgatctcctacattgagaagtacggcgataagatgcgggagtacctcctggcgaagtcgctgtctccgtcacagttctactccattctcaagacatacgaggctaagaaccagatcccgtggcacctgtggaagtacctggagctgcccctctccgagaaggacaaggtctgctacctcagcaagaaggccattaagaactggatcgataatgtcgaggagctcctgtggttcctgggcttctacgttgccaggggctcactgatcaagaacgaggtggtcctcaagggcgagccatcccagctggagaaggtcatcgagctcattgagaggatcttcgagtacaagagcgagatcaatgactcgggctacatttcgatcaagtctaagattctcgttgatctgatcggctacgggctcaacttcgggaatcaggagaaggacattccaaactggatcctgcagctccctgagcagcagctcatccggttcctgaagggcttcgtggctgggaacaacctggagaaccagctgaatttctacctggagttcaagacggactctcagctggtggcggagaagctggtcctcatcctgtcgaagttcggcctcgtcgctgacgtttctgagatcgaggttaacgaggaggatattgccaagatctaccgcatcattatcgagggcctggaggacaagaacatccataatctctctaaggtggagcagaagatttcagctctgaccacgggcgatatcgcttgggggaagattgagtccatcgaggagttcgagatcgacgattacgtctacgacttctctgttccaaactacgagaacttcatcgggggctcttacaatgttttcgctcataactccattgtggggacagccacgttcgatcagtactggagcgtgcgcacctctaagcggacttcaggaacagtgaccgtgaccgatcacttccgcgcctgggcgaaccggggcctgaacctcggcacaatagaccaaattacattgtgcgtggagggttaccaaagctctggatcagccaacatcacccagaacaccttctctcagggctcttcttccggcagttcgggtggctcatccggctccacaacgactactcgcatcgagtgtgagaacatgtccttgtccggaccctacgttagcaggatcaccaatccctttaatggtattgcgctgtacgccaacggagacacagcccgcgctaccgttaacttccccgcaagtcgcaactacaatttccgcctgcggggttgcggcaacaacaataatcttgcccgtgtggacctgaggatcgacggacggaccgtcgggaccttttattaccagggcacatacccctgggaggccccaattgacaatgtttatgtcagtgcggggagtcatacagtcgaaatcactgttactgcggataacggcacatgggacgtgtatgccgactacctggtgatacagtgactcgagggggggcccggtacccaattcgccctatagtgagtcgtattacaattcactggccgtcgttttacaacgtcgtgactgggaaaaccctggcgttacccaacttaatcgccttgcagcacatccccctttcgccagctggcgtaatagcgaagaggcccgcaccgatcgcccttcccaacagttgcgcagcctgaatggcgaatggaaattgtaagcgttaatattttgttaaaattcgcgttaaatttttgttaaatcagctcattttttaaccaataggccgaaatcggcaaaatcccttataaatcaaaagaatagaccgagatagggttgagtgttgttccagtttggaacaagagtccactattaaagaacgtggactccaacgtcaaagggcgaaaaaccgtctatcagggcgatggcccactacgtgaaccatcaccctaatcaagttttttggggtcgaggtgccgtaaagcactaaatcggaaccctaaagggagcccccgatttagagcttgacggggaaagccggcgaacgtggcgagaaaggaagggaagaaagcgaaaggagcgggcgctagggcgctggcaagtgtagcggtcacgctgcgcgtaaccaccacacccgccgcgcttaatgcgccgctacagggcgcgtcaggtg

SEQ ID NO: 3134 - DNA, 4799 bp, Artificial Sequence
  Synthetic Construct, AS-134 intein modified protein encoding nucleic acids in pBluescript
gcacttttcggggaaatgtgcgcggaacccctatttgtttatttttctaaatacattcaaatatgtatccgctcatgagacaataaccctgataaatgcttcaataatattgaaaaaggaagagtatgagtattcaacatttccgtgtcgcccttattcccttttttgcggcattttgccttcctgtttttgctcacccagaaacgctggtgaaagtaaaagatgctgaagatcagttgggtgcacgagtgggttacatcgaactggatctcaacagcggtaagatccttgagagttttcgccccgaagaacgttttccaatgatgagcacttttaaagttctgctatgtggcgcggtattatcccgtattgacgccgggcaagagcaactcggtcgccgcatacactattctcagaatgacttggttgagtactcaccagtcacagaaaagcatcttacggatggcatgacagtaagagaattatgcagtgctgccataaccatgagtgataacactgcggccaacttacttctgacaacgatcggaggaccgaaggagctaaccgcttttttgcacaacatgggggatcatgtaactcgccttgatcgttgggaaccggagctgaatgaagccataccaaacgacgagcgtgacaccacgatgcctgtagcaatggcaacaacgttgcgcaaactattaactggcgaactacttactctagcttcccggcaacaattaatagactggatggaggcggataaagttgcaggaccacttctgcgctcggcccttccggctggctggtttattgctgataaatctggagccggtgagcgtgggtctcgcggtatcattgcagcactggggccagatggtaagccctcccgtatcgtagttatctacacgacggggagtcaggcaactatggatgaacgaaatagacagatcgctgagataggtgcctcactgattaagcattggtaactgtcagaccaagtttactcatatatactttagattgatttaaaacttcatttttaatttaaaaggatctaggtgaagatcctttttgataatctcatgaccaaaatcccttaacgtgagttttcgttccactgagcgtcagaccccgtagaaaagatcaaaggatcttcttgagatcctttttttctgcgcgtaatctgctgcttgcaaacaaaaaaaccaccgctaccagcggtggtttgtttgccggatcaagagctaccaactctttttccgaaggtaactggcttcagcagagcgcagataccaaatactgtccttctagtgtagccgtagttaggccaccacttcaagaactctgtagcaccgcctacatacctcgctctgctaatcctgttaccagtggctgctgccagtggcgataagtcgtgtcttaccgggttggactcaagacgatagttaccggataaggcgcagcggtcgggctgaacggggggttcgtgcacacagcccagcttggagcgaacgacctacaccgaactgagatacctacagcgtgagctatgagaaagcgccacgcttcccgaagggagaaaggcggacaggtatccggtaagcggcagggtcggaacaggagagcgcacgagggagcttccagggggaaacgcctggtatctttatagtcctgtcgggtttcgccacctctgacttgagcgtcgatttttgtgatgctcgtcaggggggcggagcctatggaaaaacgccagcaacgcggcctttttacggttcctggccttttgctggccttttgctcacatgttctttcctgcgttatcccctgattctgtggataaccgtattaccgcctttgagtgagctgataccgctcgccgcagccgaacgaccgagcgcagcgagtcagtgagcgaggaagcggaagagcgcccaatacgcaaaccgcctctccccgcgcgttggccgattcattaatgcagctggcacgacaggtttcccgactggaaagcgggcagtgagcgcaacgcaattaatgtgagttagctcactcattaggcaccccaggctttacactttatgcttccggctcgtatgttgtgtggaattgtgagcggataacaatttcacacaggaaacagcatatgcaaacaagcattactctgacatccaacgcatccggtacgtttgacggttactattacgaactctggaaggatactggcaatacaacaatgacggtctacactcaaggtcgcttttcctgccagtggtcgaacatcaataacgcgttgtttaggaccgggaagaaatacaaccagaattggcagtctcttggcacaatccggatcacgtactctgcgacttacaacccaaacgggaactcctacttgtgtatctatggctggtctaccaacccattggtcgagttctacatcgttgagtcctgggggaactggagaccgcctggtgccacgtccctgggccaagtgacaatcgatggcgggacctacgacatctataggacgacacgcgtcaaccagccttgcgtttcgggggatacgctgctgattacaagggactctattcataagattaaggatgtcgtggggcagaagattgagatttggaatggcaagaactggtctcaggtcatcccgctgaagacagggaaggacaggaagctctaccgggttcgcttcggcgacgggtcgtacctggatgttaccgagtaccaccgcttcttcgtgaaggacaggttcggcaagaagtacgaggaggtgcagaccaaggatctcctgacgcactccaagtacgccctggacgtcgagccattcatcattgattaccatgacggcgattcgatcaacctctcttacgcttacacactgggggctgctctcggcaatgggactatcgaccagaactctaatggcaagattagggtgtactcacataaggccgagctgatcttcgcgggcaacaagtccctggagcggcagtacaattacctcccgagcttcgtggacgtcattgatctcggcttctcgggggagctcctgaggaggctgcagaccgagcccgacgctctcaacacgatcgcctcatggaataagtccgctatcctggccttcattgcgggcctcgctgacacagatgggagcgagactaagggcaacgggatcaagatttccgtgagcgactacgagagggccaagcggctgcagctcctgctcacgaagtgcggcattagggcgagcgtcaatctgatggcttcgcggggctgcaccacgaacctcggggagcgcaatcaggacctgtactacctccagatcaccgattgccgggagattccatgccagcgcctcgacacaactaaggtttgcgaggcgaagttccagggcaagtaccagaccatccagaacgtcgaggagctgcctggcctccacgatacgtactgcttcgaggagccagagttccacaagggggttttcggcaatgctctcacaggcaactccattgtggggacagccacgttcgatcagtactggagcgtgcgcacctctaagcggacttcaggaacagtgaccgtgaccgatcacttccgcgcctgggcgaaccggggcctgaacctcggcacaatagaccaaattacattgtgcgtggagggttaccaaagctctggatcagccaacatcacccagaacaccttctctcagggctcttcttccggcagttcgggtggctcatccggctccacaacgactactcgcatcgagtgtgagaacatgtccttgtccggaccctacgttagcaggatcaccaatccctttaatggtattgcgctgtacgccaacggagacacagcccgcgctaccgttaacttccccgcaagtcgcaactacaatttccgcctgcggggttgcggcaacaacaataatcttgcccgtgtggacctgaggatcgacggacggaccgtcgggaccttttattaccagggcacatacccctgggaggccccaattgacaatgtttatgtcagtgcggggagtcatacagtcgaaatcactgttactgcggataacggcacatgggacgtgtatgccgactacctggtgatacagtgactcgagggggggcccggtacccaattcgccctatagtgagtcgtattacaattcactggccgtcgttttacaacgtcgtgactgggaaaaccctggcgttacccaacttaatcgccttgcagcacatccccctttcgccagctggcgtaatagcgaagaggcccgcaccgatcgcccttcccaacagttgcgcagcctgaatggcgaatggaaattgtaagcgttaatattttgttaaaattcgcgttaaatttttgttaaatcagctcattttttaaccaataggccgaaatcggcaaaatcccttataaatcaaaagaatagaccgagatagggttgagtgttgttccagtttggaacaagagtccactattaaagaacgtggactccaacgtcaaagggcgaaaaaccgtctatcagggcgatggcccactacgtgaaccatcaccctaatcaagttttttggggtcgaggtgccgtaaagcactaaatcggaaccctaaagggagcccccgatttagagcttgacggggaaagccggcgaacgtggcgagaaaggaagggaagaaagcgaaaggagcgggcgctagggcgctggcaagtgtagcggtcacgctgcgcgtaaccaccacacccgccgcgcttaatgcgccgctacagggcgcgtcaggtg

SEQ ID NO: 3135 - DNA, 4973 bp, Artificial Sequence
  Synthetic Construct, AS-135 intein modified protein encoding nucleic acids in pBluescript
gcacttttcggggaaatgtgcgcggaacccctatttgtttatttttctaaatacattcaaatatgtatccgctcatgagacaataaccctgataaatgcttcaataatattgaaaaaggaagagtatgagtattcaacatttccgtgtcgcccttattcccttttttgcggcattttgccttcctgtttttgctcacccagaaacgctggtgaaagtaaaagatgctgaagatcagttgggtgcacgagtgggttacatcgaactggatctcaacagcggtaagatccttgagagttttcgccccgaagaacgttttccaatgatgagcacttttaaagttctgctatgtggcgcggtattatcccgtattgacgccgggcaagagcaactcggtcgccgcatacactattctcagaatgacttggttgagtactcaccagtcacagaaaagcatcttacggatggcatgacagtaagagaattatgcagtgctgccataaccatgagtgataacactgcggccaacttacttctgacaacgatcggaggaccgaaggagctaaccgcttttttgcacaacatgggggatcatgtaactcgccttgatcgttgggaaccggagctgaatgaagccataccaaacgacgagcgtgacaccacgatgcctgtagcaatggcaacaacgttgcgcaaactattaactggcgaactacttactctagcttcccggcaacaattaatagactggatggaggcggataaagttgcaggaccacttctgcgctcggcccttccggctggctggtttattgctgataaatctggagccggtgagcgtgggtctcgcggtatcattgcagcactggggccagatggtaagccctcccgtatcgtagttatctacacgacggggagtcaggcaactatggatgaacgaaatagacagatcgctgagataggtgcctcactgattaagcattggtaactgtcagaccaagtttactcatatatactttagattgatttaaaacttcatttttaatttaaaaggatctaggtgaagatcctttttgataatctcatgaccaaaatcccttaacgtgagttttcgttccactgagcgtcagaccccgtagaaaagatcaaaggatcttcttgagatcctttttttctgcgcgtaatctgctgcttgcaaacaaaaaaaccaccgctaccagcggtggtttgtttgccggatcaagagctaccaactctttttccgaaggtaactggcttcagcagagcgcagataccaaatactgtccttctagtgtagccgtagttaggccaccacttcaagaactctgtagcaccgcctacatacctcgctctgctaatcctgttaccagtggctgctgccagtggcgataagtcgtgtcttaccgggttggactcaagacgatagttaccggataaggcgcagcggtcgggctgaacggggggttcgtgcacacagcccagcttggagcgaacgacctacaccgaactgagatacctacagcgtgagctatgagaaagcgccacgcttcccgaagggagaaaggcggacaggtatccggtaagcggcagggtcggaacaggagagcgcacgagggagcttccagggggaaacgcctggtatctttatagtcctgtcgggtttcgccacctctgacttgagcgtcgatttttgtgatgctcgtcaggggggcggagcctatggaaaaacgccagcaacgcggcctttttacggttcctggccttttgctggccttttgctcacatgttctttcctgcgttatcccctgattctgtggataaccgtattaccgcctttgagtgagctgataccgctcgccgcagccgaacgaccgagcgcagcgagtcagtgagcgaggaagcggaagagcgcccaatacgcaaaccgcctctccccgcgcgttggccgattcattaatgcagctggcacgacaggtttcccgactggaaagcgggcagtgagcgcaacgcaattaatgtgagttagctcactcattaggcaccccaggctttacactttatgcttccggctcgtatgttgtgtggaattgtgagcggataacaatttcacacaggaaacagcatatgcaaacaagcattactctgacatccaacgcatccggtacgtttgacggttactattacgaactctggaaggatactggcaatacaacaatgacggtctacactcaaggtcgcttttcctgccagtggtcgaacatcaataacgcgttgtttaggaccgggaagaaatacaaccagaattggcagtctcttggcacaatccggatcacgtactctgcgacttacaacccaaacgggaactcctacttgtgtatctatggctggtctaccaacccattggtcgagttctacatcgttgagtcctgggggaactggagaccgcctggtgccacgtccctgggccaagtgacaatcgatggcgggacctacgacatctataggacgacacgcgtcaaccagccttgcctggacaagacggctctgcggattttcaatcaggggctgctctacgcggatgaggtcgtgacaccgggctcgggggagacagtcggcctcgggctgacggtcaggaacggcatcggggcgtccacagccattgcgaatcagccgatggagctggttgagatcaagctcgctaacggccggaagctgcgcatgacccctaatcaccggatgtccgtgaagggcaagtggattcatgcctgcaacctcaagccggggatgctcctggactacagcatcggcgagtaccagaagcgcgaggacaccctcctgattcctctccagctggaggattacactgaggtgaacaattcgcagaccctgggccacaacggcggggtcctcaccaagaagatcatgacgccggcgtcaatgacatccgacctggcttacttcctcggctgcctgttcggcaacgggtgcatcgtccagaataagtaccaggtttgcttctaccattctcggctcgacgtgctgtacggcctccaggagaaggggaagaagctgttcggcatcaaggggtctctcaacgatttcgccaatggcaggttcgagctgtgcttcgcgtcacggcagctcttctactggctccacctgaaccagctggtcaagacgcagaagtcagaggacctggagcgcatccccctctccctgaggaggtccagcagggttactctcctgtccttcttctgcggcctgattgacaccaacggctacgtgccacaggatggcaagctcagcatcgcttcggcctcgtctgatttcattcataacctgcagcagatcggcgagtccattgggctctgcttcagcatctaccagaatacgaagggggagaacctgcagaatcagcacaacaatacatggggcctctgcctgtctcccatgctctcaaacgtggacgcgctggattacctcaaccataatagcatcaagtgccaggagggcccggtggtcatttcgaagtgcgtcctcaactactcgccctacaagatcgagtctgttaatattggcgctgtgtgcgactacagctacgatttcgccatcgagggcatcaatgataatgactcttggtactggcagggggctctcaagtctcacaactccattgtggggacagccacgttcgatcagtactggagcgtgcgcacctctaagcggacttcaggaacagtgaccgtgaccgatcacttccgcgcctgggcgaaccggggcctgaacctcggcacaatagaccaaattacattgtgcgtggagggttaccaaagctctggatcagccaacatcacccagaacaccttctctcagggctcttcttccggcagttcgggtggctcatccggctccacaacgactactcgcatcgagtgtgagaacatgtccttgtccggaccctacgttagcaggatcaccaatccctttaatggtattgcgctgtacgccaacggagacacagcccgcgctaccgttaacttccccgcaagtcgcaactacaatttccgcctgcggggttgcggcaacaacaataatcttgcccgtgtggacctgaggatcgacggacggaccgtcgggaccttttattaccagggcacatacccctgggaggccccaattgacaatgtttatgtcagtgcggggagtcatacagtcgaaatcactgttactgcggataacggcacatgggacgtgtatgccgactacctggtgatacagtgactcgagggggggcccggtacccaattcgccctatagtgagtcgtattacaattcactggccgtcgttttacaacgtcgtgactgggaaaaccctggcgttacccaacttaatcgccttgcagcacatccccctttcgccagctggcgtaatagcgaagaggcccgcaccgatcgcccttcccaacagttgcgcagcctgaatggcgaatggaaattgtaagcgttaatattttgttaaaattcgcgttaaatttttgttaaatcagctcattttttaaccaataggccgaaatcggcaaaatcccttataaatcaaaagaatagaccgagatagggttgagtgttgttccagtttggaacaagagtccactattaaagaacgtggactccaacgtcaaagggcgaaaaaccgtctatcagggcgatggcccactacgtgaaccatcaccctaatcaagttttttggggtcgaggtgccgtaaagcactaaatcggaaccctaaagggagcccccgatttagagcttgacggggaaagccggcgaacgtggcgagaaaggaagggaagaaagcgaaaggagcgggcgctagggcgctggcaagtgtagcggtcacgctgcgcgtaaccaccacacccgccgcgcttaatgcgccgctacagggcgcgtcaggtg

SEQ ID NO: 3136 - DNA, 5237 bp, Artificial Sequence
  Synthetic Construct, AS-136 intein modified protein encoding nucleic acids in pBluescript
gcacttttcggggaaatgtgcgcggaacccctatttgtttatttttctaaatacattcaaatatgtatccgctcatgagacaataaccctgataaatgcttcaataatattgaaaaaggaagagtatgagtattcaacatttccgtgtcgcccttattcccttttttgcggcattttgccttcctgtttttgctcacccagaaacgctggtgaaagtaaaagatgctgaagatcagttgggtgcacgagtgggttacatcgaactggatctcaacagcggtaagatccttgagagttttcgccccgaagaacgttttccaatgatgagcacttttaaagttctgctatgtggcgcggtattatcccgtattgacgccgggcaagagcaactcggtcgccgcatacactattctcagaatgacttggttgagtactcaccagtcacagaaaagcatcttacggatggcatgacagtaagagaattatgcagtgctgccataaccatgagtgataacactgcggccaacttacttctgacaacgatcggaggaccgaaggagctaaccgcttttttgcacaacatgggggatcatgtaactcgccttgatcgttgggaaccggagctgaatgaagccataccaaacgacgagcgtgacaccacgatgcctgtagcaatggcaacaacgttgcgcaaactattaactggcgaactacttactctagcttcccggcaacaattaatagactggatggaggcggataaagttgcaggaccacttctgcgctcggcccttccggctggctggtttattgctgataaatctggagccggtgagcgtgggtctcgcggtatcattgcagcactggggccagatggtaagccctcccgtatcgtagttatctacacgacggggagtcaggcaactatggatgaacgaaatagacagatcgctgagataggtgcctcactgattaagcattggtaactgtcagaccaagtttactcatatatactttagattgatttaaaacttcatttttaatttaaaaggatctaggtgaagatcctttttgataatctcatgaccaaaatcccttaacgtgagttttcgttccactgagcgtcagaccccgtagaaaagatcaaaggatcttcttgagatcctttttttctgcgcgtaatctgctgcttgcaaacaaaaaaaccaccgctaccagcggtggtttgtttgccggatcaagagctaccaactctttttccgaaggtaactggcttcagcagagcgcagataccaaatactgtccttctagtgtagccgtagttaggccaccacttcaagaactctgtagcaccgcctacatacctcgctctgctaatcctgttaccagtggctgctgccagtggcgataagtcgtgtcttaccgggttggactcaagacgatagttaccggataaggcgcagcggtcgggctgaacggggggttcgtgcacacagcccagcttggagcgaacgacctacaccgaactgagatacctacagcgtgagctatgagaaagcgccacgcttcccgaagggagaaaggcggacaggtatccggtaagcggcagggtcggaacaggagagcgcacgagggagcttccagggggaaacgcctggtatctttatagtcctgtcgggtttcgccacctctgacttgagcgtcgatttttgtgatgctcgtcaggggggcggagcctatggaaaaacgccagcaacgcggcctttttacggttcctggccttttgctggccttttgctcacatgttctttcctgcgttatcccctgattctgtggataaccgtattaccgcctttgagtgagctgataccgctcgccgcagccgaacgaccgagcgcagcgagtcagtgagcgaggaagcggaagagcgcccaatacgcaaaccgcctctccccgcgcgttggccgattcattaatgcagctggcacgacaggtttcccgactggaaagcgggcagtgagcgcaacgcaattaatgtgagttagctcactcattaggcaccccaggctttacactttatgcttccggctcgtatgttgtgtggaattgtgagcggataacaatttcacacaggaaacagcatatgcaaacaagcattactctgacatccaacgcatccggtacgtttgacggttactattacgaactctggaaggatactggcaatacaacaatgacggtctacactcaaggtcgcttttcctgccagtggtcgaacatcaataacgcgttgtttaggaccgggaagaaatacaaccagaattggcagtctcttggcacaatccggatcacgtactctgcgacttacaacccaaacgggaactcctacttgtgtatctatggctggtctaccaacccattggtcgagttctacatcgttgagtcctgggggaactggagaccgcctggtgccacgtccctgggccaagtgacaatcgatggcgggacctacgacatctataggacgacacgcgtcaaccagccttgcgtgctgcatgacactgagatctacgtgaatggcatggttatggaggcggagcagatttggcaggcttacgcgggggaggcggagttcgacggcgaggggttctggacagagccgaacaaggagctcctggttaatagcctcgatgagaccacgggcaagatcgtgttcgcccggattcgcaggctgtaccgccagtgggttagggagaagctcaggaaggtgcggctgaaggacggctccagcatcacaattacttgcaggcacaagctcttcatccgggactcctggaagaacgatttccaagtgggcgacgatgtctgcgttcccgcgaagctgatgtgggacgggaagccagaggacccagatgtggtcaagttcgtcgcttggcaggttgctgagggctgggagagggtcaattccggcatgttcggggttagccagaagggcaaggacgtgctggaggggctcctggaggtcttctcgcggctgggcaagcgctacgatatcaagattaactgcccaaaggttgtggcgcacgggtctaagaagaattgctacgagttcagcgctcattcgctggagtacaggaagttcctggaggagaagcgctacggctgggggaagaggtcccatgagaagaccatccctctgttcattatgcaggccgacctcgattcggtgcgggtcttcctgtctaactacttcgacgcggagggctgggtgaataagaccgttcgctgcgtggagatctccacggcctcgtctcagctcatccaggagctgagcattctcctgcggcgcttcggcgtctggatgaagatctcaccgcagcagaagtgcgctaccaacggcacgggggttttctgcacatactacatcgggactttcggcgggaatagcgccaggtgcttcctccaggagatcggcttcaacgacagcgggaagcaggagaatctgaagtcgatctgcgagaagattgcggactctaacgtggagggcatcccggcttcagatattgtggccgagctcgtcgagaagacccagctcccagtcggcagcctggggatccaggaccctatctacatggacggctgccaggatttctctcccacgtcactggagaaggtcatcaactcaattgaggatatcatttccggcgctggggaggaggagtacggccagctcaagtcatccaagctgaggaacaagacactggaggcttactcgctcctgaatatcctggagctggagatctacaagactcggctccagaagctcctgaaccaggaggtgtactactgccagatcgagtccattgaggagatggagtacgagggctgggtctacgacttcgaggtttccaagtaccacaatttcgttgctaacaacatcatttgccacaattccattgtggggacagccacgttcgatcagtactggagcgtgcgcacctctaagcggacttcaggaacagtgaccgtgaccgatcacttccgcgcctgggcgaaccggggcctgaacctcggcacaatagaccaaattacattgtgcgtggagggttaccaaagctctggatcagccaacatcacccagaacaccttctctcagggctcttcttccggcagttcgggtggctcatccggctccacaacgactactcgcatcgagtgtgagaacatgtccttgtccggaccctacgttagcaggatcaccaatccctttaatggtattgcgctgtacgccaacggagacacagcccgcgctaccgttaacttccccgcaagtcgcaactacaatttccgcctgcggggttgcggcaacaacaataatcttgcccgtgtggacctgaggatcgacggacggaccgtcgggaccttttattaccagggcacatacccctgggaggccccaattgacaatgtttatgtcagtgcggggagtcatacagtcgaaatcactgttactgcggataacggcacatgggacgtgtatgccgactacctggtgatacagtgactcgagggggggcccggtacccaattcgccctatagtgagtcgtattacaattcactggccgtcgttttacaacgtcgtgactgggaaaaccctggcgttacccaacttaatcgccttgcagcacatccccctttcgccagctggcgtaatagcgaagaggcccgcaccgatcgcccttcccaacagttgcgcagcctgaatggcgaatggaaattgtaagcgttaatattttgttaaaattcgcgttaaatttttgttaaatcagctcattttttaaccaataggccgaaatcggcaaaatcccttataaatcaaaagaatagaccgagatagggttgagtgttgttccagtttggaacaagagtccactattaaagaacgtggactccaacgtcaaagggcgaaaaaccgtctatcagggcgatggcccactacgtgaaccatcaccctaatcaagttttttggggtcgaggtgccgtaaagcactaaatcggaaccctaaagggagcccccgatttagagcttgacggggaaagccggcgaacgtggcgagaaaggaagggaagaaagcgaaaggagcgggcgctagggcgctggcaagtgtagcggtcacgctgcgcgtaaccaccacacccgccgcgcttaatgcgccgctacagggcgcgtcaggtg

SEQ ID NO: 3137 - DNA, 4997 bp, Artificial Sequence
  Synthetic Construct, AS-137 intein modified protein encoding nucleic acids in pBluescript
gcacttttcggggaaatgtgcgcggaacccctatttgtttatttttctaaatacattcaaatatgtatccgctcatgagacaataaccctgataaatgcttcaataatattgaaaaaggaagagtatgagtattcaacatttccgtgtcgcccttattcccttttttgcggcattttgccttcctgtttttgctcacccagaaacgctggtgaaagtaaaagatgctgaagatcagttgggtgcacgagtgggttacatcgaactggatctcaacagcggtaagatccttgagagttttcgccccgaagaacgttttccaatgatgagcacttttaaagttctgctatgtggcgcggtattatcccgtattgacgccgggcaagagcaactcggtcgccgcatacactattctcagaatgacttggttgagtactcaccagtcacagaaaagcatcttacggatggcatgacagtaagagaattatgcagtgctgccataaccatgagtgataacactgcggccaacttacttctgacaacgatcggaggaccgaaggagctaaccgcttttttgcacaacatgggggatcatgtaactcgccttgatcgttgggaaccggagctgaatgaagccataccaaacgacgagcgtgacaccacgatgcctgtagcaatggcaacaacgttgcgcaaactattaactggcgaactacttactctagcttcccggcaacaattaatagactggatggaggcggataaagttgcaggaccacttctgcgctcggcccttccggctggctggtttattgctgataaatctggagccggtgagcgtgggtctcgcggtatcattgcagcactggggccagatggtaagccctcccgtatcgtagttatctacacgacggggagtcaggcaactatggatgaacgaaatagacagatcgctgagataggtgcctcactgattaagcattggtaactgtcagaccaagtttactcatatatactttagattgatttaaaacttcatttttaatttaaaaggatctaggtgaagatcctttttgataatctcatgaccaaaatcccttaacgtgagttttcgttccactgagcgtcagaccccgtagaaaagatcaaaggatcttcttgagatcctttttttctgcgcgtaatctgctgcttgcaaacaaaaaaaccaccgctaccagcggtggtttgtttgccggatcaagagctaccaactctttttccgaaggtaactggcttcagcagagcgcagataccaaatactgtccttctagtgtagccgtagttaggccaccacttcaagaactctgtagcaccgcctacatacctcgctctgctaatcctgttaccagtggctgctgccagtggcgataagtcgtgtcttaccgggttggactcaagacgatagttaccggataaggcgcagcggtcgggctgaacggggggttcgtgcacacagcccagcttggagcgaacgacctacaccgaactgagatacctacagcgtgagctatgagaaagcgccacgcttcccgaagggagaaaggcggacaggtatccggtaagcggcagggtcggaacaggagagcgcacgagggagcttccagggggaaacgcctggtatctttatagtcctgtcgggtttcgccacctctgacttgagcgtcgatttttgtgatgctcgtcaggggggcggagcctatggaaaaacgccagcaacgcggcctttttacggttcctggccttttgctggccttttgctcacatgttctttcctgcgttatcccctgattctgtggataaccgtattaccgcctttgagtgagctgataccgctcgccgcagccgaacgaccgagcgcagcgagtcagtgagcgaggaagcggaagagcgcccaatacgcaaaccgcctctccccgcgcgttggccgattcattaatgcagctggcacgacaggtttcccgactggaaagcgggcagtgagcgcaacgcaattaatgtgagttagctcactcattaggcaccccaggctttacactttatgcttccggctcgtatgttgtgtggaattgtgagcggataacaatttcacacaggaaacagcatatgcaaacaagcattactctgacatccaacgcatccggtacgtttgacggttactattacgaactctggaaggatactggcaatacaacaatgacggtctacactcaaggtcgcttttcctgccagtggtcgaacatcaataacgcgttgtttaggaccgggaagaaatacaaccagaattggcagtctcttggcacaatccggatcacgtactctgcgacttacaacccaaacgggaactcctacttgtgtatctatggctggtctaccaacccattggtcgagttctacatcgttgagtcctgggggaactggagaccgcctggtgccacgtccctgggccaagtgacaatcgatggcgggacctacgacatctataggacgacacgcgtcaaccagccttcggttacgggggatactgaggttactattaggcggaatgggcggattgagttcgtccctattgagaagctgttcgagcgggtggatcaccgggtgggggagaaggagtactgcgtgctcggcggggtcgaggctctcacactggacaacaggggcaggctggtctggaagaaggtcccatacgttatgaggcacaagactgataagaggatctaccgggtgtggttcacaaactcctggtacctcgacgtcactgaggatcattcactcatcggctacctgaatacctccaaggttaagccagggaagccactcaaggagaggctggtggaggtcaagccagaggagctcggcgggaaggtcaagtccctgatcaccccaaaccgccctatcgccaggacgattaaggccaatcctatcgcggttaagctctgggagctgattggcctcctggtgggcgacgggaactggggcgggcagagcaattgggcgaagtactacgtgggcctctcgtgcgggctggataaggctgagatcgagcgcaaggtcctcaacccgctgagggaggcctcggttatttctaattactacgacaagtccaagaagggcgatgtctcaatcctctccaagtggctggcggggttcatggttaagtacttcaaggacgagaacggcaataaggctatcccgtctttcatgttcaacctcccccgggagtacattgaggctttcctcaggggcctgttctccgctgacgggaccgtgagcctgaggaggggcatcccggagattaggctcacgtcggttaaccgggagctgtctgatgcggtgcgcaagctcctgtggctcgttggcgtgtccaacagcctgttcaccgagacgaagcccaatcgctacctggagaaggagagcggcacccactcgatccatgtcaggattaagaacaagcaccggttcgccgaccgcatcggcttcctgattgataggaagtctacaaagctctcagagaacctgggcgggcatactaataagaagagggcgtacaagtacgacttcgatctggtgtacccgcggaagatcgaggagattacgtacgacggctacgtctacgatattgaggttgagggcacacataggttcttcgctaatggcattctcgttcataattccattgtggggacagccacgttcgatcagtactggagcgtgcgcacctctaagcggacttcaggaacagtgaccgtgaccgatcacttccgcgcctgggcgaaccggggcctgaacctcggcacaatagaccaaattacattgtgcgtggagggttaccaaagctctggatcagccaacatcacccagaacaccttctctcagggctcttcttccggcagttcgggtggctcatccggctccacaacgactactcgcatcgagtgtgagaacatgtccttgtccggaccctacgttagcaggatcaccaatccctttaatggtattgcgctgtacgccaacggagacacagcccgcgctaccgttaacttccccgcaagtcgcaactacaatttccgcctgcggggttgcggcaacaacaataatcttgcccgtgtggacctgaggatcgacggacggaccgtcgggaccttttattaccagggcacatacccctgggaggccccaattgacaatgtttatgtcagtgcggggagtcatacagtcgaaatcactgttactgcggataacggcacatgggacgtgtatgccgactacctggtgatacagtgactcgagggggggcccggtacccaattcgccctatagtgagtcgtattacaattcactggccgtcgttttacaacgtcgtgactgggaaaaccctggcgttacccaacttaatcgccttgcagcacatccccctttcgccagctggcgtaatagcgaagaggcccgcaccgatcgcccttcccaacagttgcgcagcctgaatggcgaatggaaattgtaagcgttaatattttgttaaaattcgcgttaaatttttgttaaatcagctcattttttaaccaataggccgaaatcggcaaaatcccttataaatcaaaagaatagaccgagatagggttgagtgttgttccagtttggaacaagagtccactattaaagaacgtggactccaacgtcaaagggcgaaaaaccgtctatcagggcgatggcccactacgtgaaccatcaccctaatcaagttttttggggtcgaggtgccgtaaagcactaaatcggaaccctaaagggagcccccgatttagagcttgacggggaaagccggcgaacgtggcgagaaaggaagggaagaaagcgaaaggagcgggcgctagggcgctggcaagtgtagcggtcacgctgcgcgtaaccaccacacccgccgcgcttaatgcgccgctacagggcgcgtcaggtg

SEQ ID NO: 3138 - DNA, 5096 bp, Artificial Sequence
  Synthetic Construct, AS-138 intein modified protein encoding nucleic acids in pBluescript
gcacttttcggggaaatgtgcgcggaacccctatttgtttatttttctaaatacattcaaatatgtatccgctcatgagacaataaccctgataaatgcttcaataatattgaaaaaggaagagtatgagtattcaacatttccgtgtcgcccttattcccttttttgcggcattttgccttcctgtttttgctcacccagaaacgctggtgaaagtaaaagatgctgaagatcagttgggtgcacgagtgggttacatcgaactggatctcaacagcggtaagatccttgagagttttcgccccgaagaacgttttccaatgatgagcacttttaaagttctgctatgtggcgcggtattatcccgtattgacgccgggcaagagcaactcggtcgccgcatacactattctcagaatgacttggttgagtactcaccagtcacagaaaagcatcttacggatggcatgacagtaagagaattatgcagtgctgccataaccatgagtgataacactgcggccaacttacttctgacaacgatcggaggaccgaaggagctaaccgcttttttgcacaacatgggggatcatgtaactcgccttgatcgttgggaaccggagctgaatgaagccataccaaacgacgagcgtgacaccacgatgcctgtagcaatggcaacaacgttgcgcaaactattaactggcgaactacttactctagcttcccggcaacaattaatagactggatggaggcggataaagttgcaggaccacttctgcgctcggcccttccggctggctggtttattgctgataaatctggagccggtgagcgtgggtctcgcggtatcattgcagcactggggccagatggtaagccctcccgtatcgtagttatctacacgacggggagtcaggcaactatggatgaacgaaatagacagatcgctgagataggtgcctcactgattaagcattggtaactgtcagaccaagtttactcatatatactttagattgatttaaaacttcatttttaatttaaaaggatctaggtgaagatcctttttgataatctcatgaccaaaatcccttaacgtgagttttcgttccactgagcgtcagaccccgtagaaaagatcaaaggatcttcttgagatcctttttttctgcgcgtaatctgctgcttgcaaacaaaaaaaccaccgctaccagcggtggtttgtttgccggatcaagagctaccaactctttttccgaaggtaactggcttcagcagagcgcagataccaaatactgtccttctagtgtagccgtagttaggccaccacttcaagaactctgtagcaccgcctacatacctcgctctgctaatcctgttaccagtggctgctgccagtggcgataagtcgtgtcttaccgggttggactcaagacgatagttaccggataaggcgcagcggtcgggctgaacggggggttcgtgcacacagcccagcttggagcgaacgacctacaccgaactgagatacctacagcgtgagctatgagaaagcgccacgcttcccgaagggagaaaggcggacaggtatccggtaagcggcagggtcggaacaggagagcgcacgagggagcttccagggggaaacgcctggtatctttatagtcctgtcgggtttcgccacctctgacttgagcgtcgatttttgtgatgctcgtcaggggggcggagcctatggaaaaacgccagcaacgcggcctttttacggttcctggccttttgctggccttttgctcacatgttctttcctgcgttatcccctgattctgtggataaccgtattaccgcctttgagtgagctgataccgctcgccgcagccgaacgaccgagcgcagcgagtcagtgagcgaggaagcggaagagcgcccaatacgcaaaccgcctctccccgcgcgttggccgattcattaatgcagctggcacgacaggtttcccgactggaaagcgggcagtgagcgcaacgcaattaatgtgagttagctcactcattaggcaccccaggctttacactttatgcttccggctcgtatgttgtgtggaattgtgagcggataacaatttcacacaggaaacagcatatgcaaacaagcattactctgacatccaacgcatccggtacgtttgacggttactattacgaactctggaaggatactggcaatacaacaatgacggtctacactcaaggtcgcttttcctgccagtggtcgaacatcaataacgcgttgtttaggaccgggaagaaatacaaccagaattggcagtctcttggcacaatccggatcacgtactctgcgacttacaacccaaacgggaactcctacttgtgtatctatggctggtctaccaacccattggtcgagttctacatcgttgagtcctgggggaactggagaccgcctggtgccacgtccctgggccaagtgacaatcgatggcgggacctacgacatctataggacgacacgcgtcaaccagccttgcctgaccgctgatacttacgtttggacagatcgggggctggagacagtcgctgaggttttcgggcgggcggggctccctctctcatccactagcagggttaccgacgtgagggaccgggatatccgggtggtcaacgagaagggcgagctggagcaggtggctgctctcacgcataatgggaggcagccagttgtgaggatcacagtcgcttccggcaggcaggtcacggttacacggaaccaccctctgcgcgtcatgaatgacgatggcttcattgtttggagggaggctgggcagctgagggagggcgacgtgctcgtctccgctgccttcggcgctgtccaggctgcttcgggcgggggcctctctgaggacgaggctgttctcctggggtacctgaccgctgctggcagcctcgatccagctgggcatgtgtgcttcaccacgacagacatcgagacaggcgctgagttcgctgctctggctgagtggctcctggacactaccgtcactgctgttccaggggatggccaggtggcctacgtgctgtccgacccagctgctaggcacacgctcgctgagcgctacggcgtggattacgctgctgctgctcggatcccgcagtgcgtccgcactgctggcgacaagatgcagagggctttcctcgctgctctgtacaccgctgctggctggactgacaccagcgctgccgttgggctgaggacggcttcggctccactcgcgagggaggtgcagtacctcctgtacgggctgggcatcccagccgacctcgataggtctcacgggaacggccagcatccttgggctgtgaccatttcaccagctgctgctccaaggttccacactgaggtcggcttccgcaccgctcagcagtcgccacagacggggctgcatgagccaacaccacaggtggaggctatcccaaatctcacgggcctgattcacgctctcagggactcaatcggggatcgggccgagtccacagacgatccattccctgctgctagcgggggcgcttacgacagggatcaggttcgccgcgtgatcgactgggctaagaggaggactgatgaggctccagctaccgctaacgctatcctcggctacctgacgcagctcacagatgccaggtacacgtacgagccaattacagccgtcgaggacgcgggccagcagcctaccttcgacctcatggttccaaggactcatagcttcctcgccaatggcattctctcacacaactccattgtggggacagccacgttcgatcagtactggagcgtgcgcacctctaagcggacttcaggaacagtgaccgtgaccgatcacttccgcgcctgggcgaaccggggcctgaacctcggcacaatagaccaaattacattgtgcgtggagggttaccaaagctctggatcagccaacatcacccagaacaccttctctcagggctcttcttccggcagttcgggtggctcatccggctccacaacgactactcgcatcgagtgtgagaacatgtccttgtccggaccctacgttagcaggatcaccaatccctttaatggtattgcgctgtacgccaacggagacacagcccgcgctaccgttaacttccccgcaagtcgcaactacaatttccgcctgcggggttgcggcaacaacaataatcttgcccgtgtggacctgaggatcgacggacggaccgtcgggaccttttattaccagggcacatacccctgggaggccccaattgacaatgtttatgtcagtgcggggagtcatacagtcgaaatcactgttactgcggataacggcacatgggacgtgtatgccgactacctggtgatacagtgactcgagggggggcccggtacccaattcgccctatagtgagtcgtattacaattcactggccgtcgttttacaacgtcgtgactgggaaaaccctggcgttacccaacttaatcgccttgcagcacatccccctttcgccagctggcgtaatagcgaagaggcccgcaccgatcgcccttcccaacagttgcgcagcctgaatggcgaatggaaattgtaagcgttaatattttgttaaaattcgcgttaaatttttgttaaatcagctcattttttaaccaataggccgaaatcggcaaaatcccttataaatcaaaagaatagaccgagatagggttgagtgttgttccagtttggaacaagagtccactattaaagaacgtggactccaacgtcaaagggcgaaaaaccgtctatcagggcgatggcccactacgtgaaccatcaccctaatcaagttttttggggtcgaggtgccgtaaagcactaaatcggaaccctaaagggagcccccgatttagagcttgacggggaaagccggcgaacgtggcgagaaaggaagggaagaaagcgaaaggagcgggcgctagggcgctggcaagtgtagcggtcacgctgcgcgtaaccaccacacccgccgcgcttaatgcgccgctacagggcgcgtcaggtg

SEQ ID NO: 3139 - DNA, 4901 bp, Artificial Sequence
  Synthetic Construct, AS-139 intein modified protein encoding nucleic acids in pBluescript
gcacttttcggggaaatgtgcgcggaacccctatttgtttatttttctaaatacattcaaatatgtatccgctcatgagacaataaccctgataaatgcttcaataatattgaaaaaggaagagtatgagtattcaacatttccgtgtcgcccttattcccttttttgcggcattttgccttcctgtttttgctcacccagaaacgctggtgaaagtaaaagatgctgaagatcagttgggtgcacgagtgggttacatcgaactggatctcaacagcggtaagatccttgagagttttcgccccgaagaacgttttccaatgatgagcacttttaaagttctgctatgtggcgcggtattatcccgtattgacgccgggcaagagcaactcggtcgccgcatacactattctcagaatgacttggttgagtactcaccagtcacagaaaagcatcttacggatggcatgacagtaagagaattatgcagtgctgccataaccatgagtgataacactgcggccaacttacttctgacaacgatcggaggaccgaaggagctaaccgcttttttgcacaacatgggggatcatgtaactcgccttgatcgttgggaaccggagctgaatgaagccataccaaacgacgagcgtgacaccacgatgcctgtagcaatggcaacaacgttgcgcaaactattaactggcgaactacttactctagcttcccggcaacaattaatagactggatggaggcggataaagttgcaggaccacttctgcgctcggcccttccggctggctggtttattgctgataaatctggagccggtgagcgtgggtctcgcggtatcattgcagcactggggccagatggtaagccctcccgtatcgtagttatctacacgacggggagtcaggcaactatggatgaacgaaatagacagatcgctgagataggtgcctcactgattaagcattggtaactgtcagaccaagtttactcatatatactttagattgatttaaaacttcatttttaatttaaaaggatctaggtgaagatcctttttgataatctcatgaccaaaatcccttaacgtgagttttcgttccactgagcgtcagaccccgtagaaaagatcaaaggatcttcttgagatcctttttttctgcgcgtaatctgctgcttgcaaacaaaaaaaccaccgctaccagcggtggtttgtttgccggatcaagagctaccaactctttttccgaaggtaactggcttcagcagagcgcagataccaaatactgtccttctagtgtagccgtagttaggccaccacttcaagaactctgtagcaccgcctacatacctcgctctgctaatcctgttaccagtggctgctgccagtggcgataagtcgtgtcttaccgggttggactcaagacgatagttaccggataaggcgcagcggtcgggctgaacggggggttcgtgcacacagcccagcttggagcgaacgacctacaccgaactgagatacctacagcgtgagctatgagaaagcgccacgcttcccgaagggagaaaggcggacaggtatccggtaagcggcagggtcggaacaggagagcgcacgagggagcttccagggggaaacgcctggtatctttatagtcctgtcgggtttcgccacctctgacttgagcgtcgatttttgtgatgctcgtcaggggggcggagcctatggaaaaacgccagcaacgcggcctttttacggttcctggccttttgctggccttttgctcacatgttctttcctgcgttatcccctgattctgtggataaccgtattaccgcctttgagtgagctgataccgctcgccgcagccgaacgaccgagcgcagcgagtcagtgagcgaggaagcggaagagcgcccaatacgcaaaccgcctctccccgcgcgttggccgattcattaatgcagctggcacgacaggtttcccgactggaaagcgggcagtgagcgcaacgcaattaatgtgagttagctcactcattaggcaccccaggctttacactttatgcttccggctcgtatgttgtgtggaattgtgagcggataacaatttcacacaggaaacagcatatgcaaacaagcattactctgacatccaacgcatccggtacgtttgacggttactattacgaactctggaaggatactggcaatacaacaatgacggtctacactcaaggtcgcttttcctgccagtggtcgaacatcaataacgcgttgtttaggaccgggaagaaatacaaccagaattggcagtctcttggcacaatccggatcacgtactctgcgacttacaacccaaacgggaactcctacttgtgtatctatggctggtctaccaacccattggtcgagttctacatcgttgagtcctgggggaactggagaccgcctggtgccacgtccctgggccaagtgacaatcgatggcgggacctacgacatctataggacgacacgcgtcaaccagccttgcatgcactacgacacactcgtgacactcgctgacggcacacaggagaagatcgggacaatcgtggaccgcaagctggacgtggaggtcctgtcgtacgatccagagaccgacaggatcgtgccaaggagggtggtcaactggttcgataatggcgccgcggaccacttcctgcagttcactgtgggcaggtctgggaagccaggcggggctcagttcaccgctacgccaaaccatctcatcaggacccctggcgggtggagggaggctggcgagctcattgctggggacagggttctggtgcacgagccacattacctcaatgagcagcagaggcaggttgtgtacggctcgctcatgggcagggggacgctggtcccagataggcacggcgggcctggcgttcacttctgcatggctcatacagccgagcaggctgcctacctggactggaaggtctccctcctgggcaacattgcccactcacgcaccgctgaggcttccgctacggtcggggttgagttcacaccgatgcccgagctcagcgagctgcatagggtcgttgatttcggcgacgggcacacccatctcacgtgggagttcctcaagcagctgacgccactcgcgctggctgtgtggtacctcgatgcgggcacactgactatccctcagtccgggactgacgatgacgccagggtgcagattgacgtcgagaccctgtcgccaggctctcggcagaggctcgtcgagtacctgagggatacccacgagctcgacgctgctgtggtccagcagggcgctgacgcgaggtctctcctggagttcacaccagctgctaccgtgcgcttcctggagctggttgcgccatacgtgcctgagtcaatgtccagcatgctcctggctcagttcaggggcaggtgcagcgtcacgccagagtactcggatccagtccagaggctcgttgctgctccagtgctggacatccaggtgaagcccggcagcacacgcaagttcgacattgaggttgagggcaatcataactacttcgtggatggggtcatggttcataattccattgtggggacagccacgttcgatcagtactggagcgtgcgcacctctaagcggacttcaggaacagtgaccgtgaccgatcacttccgcgcctgggcgaaccggggcctgaacctcggcacaatagaccaaattacattgtgcgtggagggttaccaaagctctggatcagccaacatcacccagaacaccttctctcagggctcttcttccggcagttcgggtggctcatccggctccacaacgactactcgcatcgagtgtgagaacatgtccttgtccggaccctacgttagcaggatcaccaatccctttaatggtattgcgctgtacgccaacggagacacagcccgcgctaccgttaacttccccgcaagtcgcaactacaatttccgcctgcggggttgcggcaacaacaataatcttgcccgtgtggacctgaggatcgacggacggaccgtcgggaccttttattaccagggcacatacccctgggaggccccaattgacaatgtttatgtcagtgcggggagtcatacagtcgaaatcactgttactgcggataacggcacatgggacgtgtatgccgactacctggtgatacagtgactcgagggggggcccggtacccaattcgccctatagtgagtcgtattacaattcactggccgtcgttttacaacgtcgtgactgggaaaaccctggcgttacccaacttaatcgccttgcagcacatccccctttcgccagctggcgtaatagcgaagaggcccgcaccgatcgcccttcccaacagttgcgcagcctgaatggcgaatggaaattgtaagcgttaatattttgttaaaattcgcgttaaatttttgttaaatcagctcattttttaaccaataggccgaaatcggcaaaatcccttataaatcaaaagaatagaccgagatagggttgagtgttgttccagtttggaacaagagtccactattaaagaacgtggactccaacgtcaaagggcgaaaaaccgtctatcagggcgatggcccactacgtgaaccatcaccctaatcaagttttttggggtcgaggtgccgtaaagcactaaatcggaaccctaaagggagcccccgatttagagcttgacggggaaagccggcgaacgtggcgagaaaggaagggaagaaagcgaaaggagcgggcgctagggcgctggcaagtgtagcggtcacgctgcgcgtaaccaccacacccgccgcgcttaatgcgccgctacagggcgcgtcaggtg

SEQ ID NO: 3140 - DNA, 5441 bp, Artificial Sequence
  Synthetic Construct, AS-140 intein modified protein encoding nucleic acids in pBluescript
gcacttttcggggaaatgtgcgcggaacccctatttgtttatttttctaaatacattcaaatatgtatccgctcatgagacaataaccctgataaatgcttcaataatattgaaaaaggaagagtatgagtattcaacatttccgtgtcgcccttattcccttttttgcggcattttgccttcctgtttttgctcacccagaaacgctggtgaaagtaaaagatgctgaagatcagttgggtgcacgagtgggttacatcgaactggatctcaacagcggtaagatccttgagagttttcgccccgaagaacgttttccaatgatgagcacttttaaagttctgctatgtggcgcggtattatcccgtattgacgccgggcaagagcaactcggtcgccgcatacactattctcagaatgacttggttgagtactcaccagtcacagaaaagcatcttacggatggcatgacagtaagagaattatgcagtgctgccataaccatgagtgataacactgcggccaacttacttctgacaacgatcggaggaccgaaggagctaaccgcttttttgcacaacatgggggatcatgtaactcgccttgatcgttgggaaccggagctgaatgaagccataccaaacgacgagcgtgacaccacgatgcctgtagcaatggcaacaacgttgcgcaaactattaactggcgaactacttactctagcttcccggcaacaattaatagactggatggaggcggataaagttgcaggaccacttctgcgctcggcccttccggctggctggtttattgctgataaatctggagccggtgagcgtgggtctcgcggtatcattgcagcactggggccagatggtaagccctcccgtatcgtagttatctacacgacggggagtcaggcaactatggatgaacgaaatagacagatcgctgagataggtgcctcactgattaagcattggtaactgtcagaccaagtttactcatatatactttagattgatttaaaacttcatttttaatttaaaaggatctaggtgaagatcctttttgataatctcatgaccaaaatcccttaacgtgagttttcgttccactgagcgtcagaccccgtagaaaagatcaaaggatcttcttgagatcctttttttctgcgcgtaatctgctgcttgcaaacaaaaaaaccaccgctaccagcggtggtttgtttgccggatcaagagctaccaactctttttccgaaggtaactggcttcagcagagcgcagataccaaatactgtccttctagtgtagccgtagttaggccaccacttcaagaactctgtagcaccgcctacatacctcgctctgctaatcctgttaccagtggctgctgccagtggcgataagtcgtgtcttaccgggttggactcaagacgatagttaccggataaggcgcagcggtcgggctgaacggggggttcgtgcacacagcccagcttggagcgaacgacctacaccgaactgagatacctacagcgtgagctatgagaaagcgccacgcttcccgaagggagaaaggcggacaggtatccggtaagcggcagggtcggaacaggagagcgcacgagggagcttccagggggaaacgcctggtatctttatagtcctgtcgggtttcgccacctctgacttgagcgtcgatttttgtgatgctcgtcaggggggcggagcctatggaaaaacgccagcaacgcggcctttttacggttcctggccttttgctggccttttgctcacatgttctttcctgcgttatcccctgattctgtggataaccgtattaccgcctttgagtgagctgataccgctcgccgcagccgaacgaccgagcgcagcgagtcagtgagcgaggaagcggaagagcgcccaatacgcaaaccgcctctccccgcgcgttggccgattcattaatgcagctggcacgacaggtttcccgactggaaagcgggcagtgagcgcaacgcaattaatgtgagttagctcactcattaggcaccccaggctttacactttatgcttccggctcgtatgttgtgtggaattgtgagcggataacaatttcacacaggaaacagcatatgcaaacaagcattactctgacatccaacgcatccggtacgtttgacggttactattacgaactctggaaggatactggcaatacaacaatgacggtctacactcaaggtcgcttttcctgccagtggtcgaacatcaataacgcgttgtttaggaccgggaagaaatacaaccagaattggcagtctcttggcacaatccggatcacgtactctgcgacttacaacccaaacgggaactcctacttgtgtatctatggctggtctaccaacccattggtcgagttctacatcgttgagtcctgggggaactggagaccgcctggtgccacgtccctgggccaagtgacaatcgatggcgggacctacgacatctataggacgacacgcgtcaaccagccttcgctgctgcctgaggagtggattccgctcgtggagaatggcaaggttcggctgcatcgcatcggggagttcgtggacaagctcatggagaccgacagcgagctcgtcaagcgcaacggcgataccgaggtcctggaggtgcgcgggatcagggctctgtctttcgaccggaagtcaaagaaggcgcgcgtgatgccggtcaaggctgttattcggcaccgctactccggcgatgtgtacgagatcgtcctcggcagcgggaggaggattaccgtcacggaggggcattcgctcttcgcttacggcgacggggagctgagggaggtgacaggcggggagatcaaggctggcgatctcctggctgttccaaggagggtgaacctgcccgagaagaaggagcgcctgaatctcgtcgagctcctgaggaggctcccagaggaggagacaggcgacatcattctgactatccccgtgaagggcaggaagaacttcttcaaggggatgctgcggacactccgctggatttccggcgaggagaagaggccaaggactgctaggaggtacctggagcacctggagggcctgggctacgtgcgcctcaagaagatcggctacgaggttaccgacagggaggggctggagaggtacaggaagctctacgagaggctggtggaggcggtccggtacaacggcaataagcgcgagtacctcgtggagttcaacgctgttcgcgacgtgatcgccctgatgccggaggaggagctcagggattggctggtcggcaccaggaatgggttccggatgaggcccttcgtggagatcgaggaggacttcgctaagctcctgggctactacgtctcggaggggaacgccaggaagtggcggaaccagaagaatggctggtcttacacggtgaagctctacaacgagaatcagcgcgtcctcgacgatatggagtccctggcggagaggttcttcggccgcgtgaagagggggaagaactacatcgagattccaaggaagatggcttacatcattttcgagaacctctgcggcaccctggccgagaataagcgggttccagaggcgatcttcacgtcgcctgagtctgtgcgctgggccttcatcgagggctacttcattggcgacggggatgttcatccttctaagagggtgcggctgtcaacgaagtccgagctcctggtcaacggcctcgttctcctgctcaatagcctgggggtctcggccatcaagattcgccacgactcaggcgtttacagggtttacgtgaacgaggagctcccattcacagattaccgcaagaagaagaacgcgtactactcccatgtcatccctaaggagattctggaggagactttcggcaaggtgttccagcggtccgtcagctacgagaagttccgcgagctcgtgaagtccgagaagctggacggcgagaaggccaagaggatcgagtggctgctcaacggggacgtggtcctcgataaggtcctggaggttaagaagcggccatacgagggctacgtgtacgatctctctgtggaggaggatgagaacttcctcgctggcttcgggctgctctacgctcacaattccattgtggggacagccacgttcgatcagtactggagcgtgcgcacctctaagcggacttcaggaacagtgaccgtgaccgatcacttccgcgcctgggcgaaccggggcctgaacctcggcacaatagaccaaattacattgtgcgtggagggttaccaaagctctggatcagccaacatcacccagaacaccttctctcagggctcttcttccggcagttcgggtggctcatccggctccacaacgactactcgcatcgagtgtgagaacatgtccttgtccggaccctacgttagcaggatcaccaatccctttaatggtattgcgctgtacgccaacggagacacagcccgcgctaccgttaacttccccgcaagtcgcaactacaatttccgcctgcggggttgcggcaacaacaataatcttgcccgtgtggacctgaggatcgacggacggaccgtcgggaccttttattaccagggcacatacccctgggaggccccaattgacaatgtttatgtcagtgcggggagtcatacagtcgaaatcactgttactgcggataacggcacatgggacgtgtatgccgactacctggtgatacagtgactcgagggggggcccggtacccaattcgccctatagtgagtcgtattacaattcactggccgtcgttttacaacgtcgtgactgggaaaaccctggcgttacccaacttaatcgccttgcagcacatccccctttcgccagctggcgtaatagcgaagaggcccgcaccgatcgcccttcccaacagttgcgcagcctgaatggcgaatggaaattgtaagcgttaatattttgttaaaattcgcgttaaatttttgttaaatcagctcattttttaaccaataggccgaaatcggcaaaatcccttataaatcaaaagaatagaccgagatagggttgagtgttgttccagtttggaacaagagtccactattaaagaacgtggactccaacgtcaaagggcgaaaaaccgtctatcagggcgatggcccactacgtgaaccatcaccctaatcaagttttttggggtcgaggtgccgtaaagcactaaatcggaaccctaaagggagcccccgatttagagcttgacggggaaagccggcgaacgtggcgagaaaggaagggaagaaagcgaaaggagcgggcgctagggcgctggcaagtgtagcggtcacgctgcgcgtaaccaccacacccgccgcgcttaatgcgccgctacagggcgcgtcaggtg

SEQ ID NO: 3141 - DNA, 4835 bp, Artificial Sequence
  Synthetic Construct, AS-141 intein modified protein encoding nucleic acids in pBluescript
gcacttttcggggaaatgtgcgcggaacccctatttgtttatttttctaaatacattcaaatatgtatccgctcatgagacaataaccctgataaatgcttcaataatattgaaaaaggaagagtatgagtattcaacatttccgtgtcgcccttattcccttttttgcggcattttgccttcctgtttttgctcacccagaaacgctggtgaaagtaaaagatgctgaagatcagttgggtgcacgagtgggttacatcgaactggatctcaacagcggtaagatccttgagagttttcgccccgaagaacgttttccaatgatgagcacttttaaagttctgctatgtggcgcggtattatcccgtattgacgccgggcaagagcaactcggtcgccgcatacactattctcagaatgacttggttgagtactcaccagtcacagaaaagcatcttacggatggcatgacagtaagagaattatgcagtgctgccataaccatgagtgataacactgcggccaacttacttctgacaacgatcggaggaccgaaggagctaaccgcttttttgcacaacatgggggatcatgtaactcgccttgatcgttgggaaccggagctgaatgaagccataccaaacgacgagcgtgacaccacgatgcctgtagcaatggcaacaacgttgcgcaaactattaactggcgaactacttactctagcttcccggcaacaattaatagactggatggaggcggataaagttgcaggaccacttctgcgctcggcccttccggctggctggtttattgctgataaatctggagccggtgagcgtgggtctcgcggtatcattgcagcactggggccagatggtaagccctcccgtatcgtagttatctacacgacggggagtcaggcaactatggatgaacgaaatagacagatcgctgagataggtgcctcactgattaagcattggtaactgtcagaccaagtttactcatatatactttagattgatttaaaacttcatttttaatttaaaaggatctaggtgaagatcctttttgataatctcatgaccaaaatcccttaacgtgagttttcgttccactgagcgtcagaccccgtagaaaagatcaaaggatcttcttgagatcctttttttctgcgcgtaatctgctgcttgcaaacaaaaaaaccaccgctaccagcggtggtttgtttgccggatcaagagctaccaactctttttccgaaggtaactggcttcagcagagcgcagataccaaatactgtccttctagtgtagccgtagttaggccaccacttcaagaactctgtagcaccgcctacatacctcgctctgctaatcctgttaccagtggctgctgccagtggcgataagtcgtgtcttaccgggttggactcaagacgatagttaccggataaggcgcagcggtcgggctgaacggggggttcgtgcacacagcccagcttggagcgaacgacctacaccgaactgagatacctacagcgtgagctatgagaaagcgccacgcttcccgaagggagaaaggcggacaggtatccggtaagcggcagggtcggaacaggagagcgcacgagggagcttccagggggaaacgcctggtatctttatagtcctgtcgggtttcgccacctctgacttgagcgtcgatttttgtgatgctcgtcaggggggcggagcctatggaaaaacgccagcaacgcggcctttttacggttcctggccttttgctggccttttgctcacatgttctttcctgcgttatcccctgattctgtggataaccgtattaccgcctttgagtgagctgataccgctcgccgcagccgaacgaccgagcgcagcgagtcagtgagcgaggaagcggaagagcgcccaatacgcaaaccgcctctccccgcgcgttggccgattcattaatgcagctggcacgacaggtttcccgactggaaagcgggcagtgagcgcaacgcaattaatgtgagttagctcactcattaggcaccccaggctttacactttatgcttccggctcgtatgttgtgtggaattgtgagcggataacaatttcacacaggaaacagcatatgcaaacaagcattactctgacatccaacgcatccggtacgtttgacggttactattacgaactctggaaggatactggcaatacaacaatgacggtctacactcaaggtcgcttttcctgccagtggtcgaacatcaataacgcgttgtttaggaccgggaagaaatacaaccagaattggcagtctcttggcacaatccggatcacgtactctgcgacttacaacccaaacgggaactcctacttgtgtatctatggctggtctaccaacccattggtcgagttctacatcgttgagtcctgggggaactggagaccgcctggtgccacgtccctgggccaagtgacaatcgatggcgggacctacgacatctataggacgacacgcgtcaaccagccttcctaccatcatgatttcgagctgctgctggctgacgggcgcaaggttaagatcggggagctggtggacaagctgattgagaagaatcgggaccgcgtcatcctgggcaaggataccgagatcctcccggttgaggacattgagctcctggcctacgatctggagaagagggagatcgttaaggtgaaggctgaccgcgtctcaaggcacaaggctccagagcgcttcatcaagctcaggttctccaatggccgggagattaccgtgacgccggagcatcccgtcatggtttgggagaacggggagatcacagagaagccagcggagaagatcactcctggcgatattgctctcggggttctgcgctacccgattcaggtggacggcaagttcaaggagaggtaccgggatatgagggaggcggaggactaccaggattacctgtactcccggggcgtggtcagcaagatcaagcgcaccgggatctacttcacggtggagaaggctaggagggctctcccgcgggagctggtcaagcccctcatcaacgctggcaagattctcagggttacacagactccaaaggagcgggcgagcttcaatcagaagctggtccgcgagaacatcattgaggggtacctccagaggatcattgagcggatggacgagctggagaggctgtcgcgcgaggatccagctaaggctctggagctcctgcctaagacccagctctactacaagtacggcatcacgtacgggaagctcaagaagctggctgaggctcgcaactcctgggctgagggcatcattcagtcggcggtggctgagcgcatctctctggccaagagggagctggaggagttcttcaagtggtggaacgcgaatgtcaacttcctgaaggtgaagtgcgtcgaggagatcaagaacgaccgctgggagtgggtgtacgacgttactgtggagcctcatcatctcttcgtttcgcatgggctcgttctgcataattccattgtggggacagccacgttcgatcagtactggagcgtgcgcacctctaagcggacttcaggaacagtgaccgtgaccgatcacttccgcgcctgggcgaaccggggcctgaacctcggcacaatagaccaaattacattgtgcgtggagggttaccaaagctctggatcagccaacatcacccagaacaccttctctcagggctcttcttccggcagttcgggtggctcatccggctccacaacgactactcgcatcgagtgtgagaacatgtccttgtccggaccctacgttagcaggatcaccaatccctttaatggtattgcgctgtacgccaacggagacacagcccgcgctaccgttaacttccccgcaagtcgcaactacaatttccgcctgcggggttgcggcaacaacaataatcttgcccgtgtggacctgaggatcgacggacggaccgtcgggaccttttattaccagggcacatacccctgggaggccccaattgacaatgtttatgtcagtgcggggagtcatacagtcgaaatcactgttactgcggataacggcacatgggacgtgtatgccgactacctggtgatacagtgactcgagggggggcccggtacccaattcgccctatagtgagtcgtattacaattcactggccgtcgttttacaacgtcgtgactgggaaaaccctggcgttacccaacttaatcgccttgcagcacatccccctttcgccagctggcgtaatagcgaagaggcccgcaccgatcgcccttcccaacagttgcgcagcctgaatggcgaatggaaattgtaagcgttaatattttgttaaaattcgcgttaaatttttgttaaatcagctcattttttaaccaataggccgaaatcggcaaaatcccttataaatcaaaagaatagaccgagatagggttgagtgttgttccagtttggaacaagagtccactattaaagaacgtggactccaacgtcaaagggcgaaaaaccgtctatcagggcgatggcccactacgtgaaccatcaccctaatcaagttttttggggtcgaggtgccgtaaagcactaaatcggaaccctaaagggagcccccgatttagagcttgacggggaaagccggcgaacgtggcgagaaaggaagggaagaaagcgaaaggagcgggcgctagggcgctggcaagtgtagcggtcacgctgcgcgtaaccaccacacccgccgcgcttaatgcgccgctacagggcgcgtcaggtg

SEQ ID NO: 3142 - DNA, 5039 bp, Artificial Sequence
  Synthetic Construct, AS-142 intein modified protein encoding nucleic acids in pBluescript
gcacttttcggggaaatgtgcgcggaacccctatttgtttatttttctaaatacattcaaatatgtatccgctcatgagacaataaccctgataaatgcttcaataatattgaaaaaggaagagtatgagtattcaacatttccgtgtcgcccttattcccttttttgcggcattttgccttcctgtttttgctcacccagaaacgctggtgaaagtaaaagatgctgaagatcagttgggtgcacgagtgggttacatcgaactggatctcaacagcggtaagatccttgagagttttcgccccgaagaacgttttccaatgatgagcacttttaaagttctgctatgtggcgcggtattatcccgtattgacgccgggcaagagcaactcggtcgccgcatacactattctcagaatgacttggttgagtactcaccagtcacagaaaagcatcttacggatggcatgacagtaagagaattatgcagtgctgccataaccatgagtgataacactgcggccaacttacttctgacaacgatcggaggaccgaaggagctaaccgcttttttgcacaacatgggggatcatgtaactcgccttgatcgttgggaaccggagctgaatgaagccataccaaacgacgagcgtgacaccacgatgcctgtagcaatggcaacaacgttgcgcaaactattaactggcgaactacttactctagcttcccggcaacaattaatagactggatggaggcggataaagttgcaggaccacttctgcgctcggcccttccggctggctggtttattgctgataaatctggagccggtgagcgtgggtctcgcggtatcattgcagcactggggccagatggtaagccctcccgtatcgtagttatctacacgacggggagtcaggcaactatggatgaacgaaatagacagatcgctgagataggtgcctcactgattaagcattggtaactgtcagaccaagtttactcatatatactttagattgatttaaaacttcatttttaatttaaaaggatctaggtgaagatcctttttgataatctcatgaccaaaatcccttaacgtgagttttcgttccactgagcgtcagaccccgtagaaaagatcaaaggatcttcttgagatcctttttttctgcgcgtaatctgctgcttgcaaacaaaaaaaccaccgctaccagcggtggtttgtttgccggatcaagagctaccaactctttttccgaaggtaactggcttcagcagagcgcagataccaaatactgtccttctagtgtagccgtagttaggccaccacttcaagaactctgtagcaccgcctacatacctcgctctgctaatcctgttaccagtggctgctgccagtggcgataagtcgtgtcttaccgggttggactcaagacgatagttaccggataaggcgcagcggtcgggctgaacggggggttcgtgcacacagcccagcttggagcgaacgacctacaccgaactgagatacctacagcgtgagctatgagaaagcgccacgcttcccgaagggagaaaggcggacaggtatccggtaagcggcagggtcggaacaggagagcgcacgagggagcttccagggggaaacgcctggtatctttatagtcctgtcgggtttcgccacctctgacttgagcgtcgatttttgtgatgctcgtcaggggggcggagcctatggaaaaacgccagcaacgcggcctttttacggttcctggccttttgctggccttttgctcacatgttctttcctgcgttatcccctgattctgtggataaccgtattaccgcctttgagtgagctgataccgctcgccgcagccgaacgaccgagcgcagcgagtcagtgagcgaggaagcggaagagcgcccaatacgcaaaccgcctctccccgcgcgttggccgattcattaatgcagctggcacgacaggtttcccgactggaaagcgggcagtgagcgcaacgcaattaatgtgagttagctcactcattaggcaccccaggctttacactttatgcttccggctcgtatgttgtgtggaattgtgagcggataacaatttcacacaggaaacagcatatgcaaacaagcattactctgacatccaacgcatccggtacgtttgacggttactattacgaactctggaaggatactggcaatacaacaatgacggtctacactcaaggtcgcttttcctgccagtggtcgaacatcaataacgcgttgtttaggaccgggaagaaatacaaccagaattggcagtctcttggcacaatccggatcacgtactctgcgacttacaacccaaacgggaactcctacttgtgtatctatggctggtctaccaacccattggtcgagttctacatcgttgagtcctgggggaactggagaccgcctggtgccacgtccctgggccaagtgacaatcgatggcgggacctacgacatctataggacgacacgcgtcaaccagccttgcatgcatcctgacacatacgtggttactaagtcgggggctaagaaggtctctgagctgactgagggggatgaggtcctgacacataccggcacgttcaagaaggtcatccagccactgaggagggagcacaaggggcgcctcctggttatcaaggcctacggcaccgtgcctgtcaagattacgccggagcacatggtttgggtggtcaagcagatcaggcacaagtcccattacagcgatgggcggcaggtcatttggtgggagttcgagggcccagagtggatgacggctcaggagctgaaggagcgcctggagtccgagacagacccaaaggtgagctacatgctcctgcagccaatccctgagccgtccgtggacgcggataagattcctctgaggaaggaggtctacgttgtgaaccagcacggcaagacagacaagctccatccgtccgtgaagcggactcccgagtacctgccactcaacttcgagaccgctaggctgatcggcctctggattgctgaggggtcaacttccaagaacggcgtcatcaagttcgacatttccagcaatgaggaggatctgacggagttcatcacaggcactattaggaagtacttcccgcacgctaagatcgtcgttaaggaccatgagaggaacaggaggacggtccggttctgcaataagcgcttcgcggagtggctcagggagaacatcggccacggggctgataataagagcattccgcccctcctgctcctgaacaagaatagggaggtgcgcctgggcctcctgagggggctcatcgagggcgacggctacgtgcgcagggagtcgcagcgcagggcgaactacatcagctactcgacagtttctccctcactggcttaccagctccagctcctggtggcttcgctgggctacacctcgtctatccacaggtctattcggacagagggcatcgggaagactaggaagcccatctacgatgttaaggtgtcgggcaagtcttactactcactcctggaggagctcgggttcgaggtcccacagaggggcaacaggacctacaacgttaatcgcacgtggaagaattacctcctgctcaaggtgaggtccatcgaggaggaggagtacgagggcgacgtttacaatctggaggttgagggggatgagtcaggctctgtgggcttcatcgtgcataattccattgtggggacagccacgttcgatcagtactggagcgtgcgcacctctaagcggacttcaggaacagtgaccgtgaccgatcacttccgcgcctgggcgaaccggggcctgaacctcggcacaatagaccaaattacattgtgcgtggagggttaccaaagctctggatcagccaacatcacccagaacaccttctctcagggctcttcttccggcagttcgggtggctcatccggctccacaacgactactcgcatcgagtgtgagaacatgtccttgtccggaccctacgttagcaggatcaccaatccctttaatggtattgcgctgtacgccaacggagacacagcccgcgctaccgttaacttccccgcaagtcgcaactacaatttccgcctgcggggttgcggcaacaacaataatcttgcccgtgtggacctgaggatcgacggacggaccgtcgggaccttttattaccagggcacatacccctgggaggccccaattgacaatgtttatgtcagtgcggggagtcatacagtcgaaatcactgttactgcggataacggcacatgggacgtgtatgccgactacctggtgatacagtgactcgagggggggcccggtacccaattcgccctatagtgagtcgtattacaattcactggccgtcgttttacaacgtcgtgactgggaaaaccctggcgttacccaacttaatcgccttgcagcacatccccctttcgccagctggcgtaatagcgaagaggcccgcaccgatcgcccttcccaacagttgcgcagcctgaatggcgaatggaaattgtaagcgttaatattttgttaaaattcgcgttaaatttttgttaaatcagctcattttttaaccaataggccgaaatcggcaaaatcccttataaatcaaaagaatagaccgagatagggttgagtgttgttccagtttggaacaagagtccactattaaagaacgtggactccaacgtcaaagggcgaaaaaccgtctatcagggcgatggcccactacgtgaaccatcaccctaatcaagttttttggggtcgaggtgccgtaaagcactaaatcggaaccctaaagggagcccccgatttagagcttgacggggaaagccggcgaacgtggcgagaaaggaagggaagaaagcgaaaggagcgggcgctagggcgctggcaagtgtagcggtcacgctgcgcgtaaccaccacacccgccgcgcttaatgcgccgctacagggcgcgtcaggtg

SEQ ID NO: 3143 - DNA, 5468 bp, Artificial Sequence
  Synthetic Construct, AS-143 intein modified protein encoding nucleic acids in pBluescript
gcacttttcggggaaatgtgcgcggaacccctatttgtttatttttctaaatacattcaaatatgtatccgctcatgagacaataaccctgataaatgcttcaataatattgaaaaaggaagagtatgagtattcaacatttccgtgtcgcccttattcccttttttgcggcattttgccttcctgtttttgctcacccagaaacgctggtgaaagtaaaagatgctgaagatcagttgggtgcacgagtgggttacatcgaactggatctcaacagcggtaagatccttgagagttttcgccccgaagaacgttttccaatgatgagcacttttaaagttctgctatgtggcgcggtattatcccgtattgacgccgggcaagagcaactcggtcgccgcatacactattctcagaatgacttggttgagtactcaccagtcacagaaaagcatcttacggatggcatgacagtaagagaattatgcagtgctgccataaccatgagtgataacactgcggccaacttacttctgacaacgatcggaggaccgaaggagctaaccgcttttttgcacaacatgggggatcatgtaactcgccttgatcgttgggaaccggagctgaatgaagccataccaaacgacgagcgtgacaccacgatgcctgtagcaatggcaacaacgttgcgcaaactattaactggcgaactacttactctagcttcccggcaacaattaatagactggatggaggcggataaagttgcaggaccacttctgcgctcggcccttccggctggctggtttattgctgataaatctggagccggtgagcgtgggtctcgcggtatcattgcagcactggggccagatggtaagccctcccgtatcgtagttatctacacgacggggagtcaggcaactatggatgaacgaaatagacagatcgctgagataggtgcctcactgattaagcattggtaactgtcagaccaagtttactcatatatactttagattgatttaaaacttcatttttaatttaaaaggatctaggtgaagatcctttttgataatctcatgaccaaaatcccttaacgtgagttttcgttccactgagcgtcagaccccgtagaaaagatcaaaggatcttcttgagatcctttttttctgcgcgtaatctgctgcttgcaaacaaaaaaaccaccgctaccagcggtggtttgtttgccggatcaagagctaccaactctttttccgaaggtaactggcttcagcagagcgcagataccaaatactgtccttctagtgtagccgtagttaggccaccacttcaagaactctgtagcaccgcctacatacctcgctctgctaatcctgttaccagtggctgctgccagtggcgataagtcgtgtcttaccgggttggactcaagacgatagttaccggataaggcgcagcggtcgggctgaacggggggttcgtgcacacagcccagcttggagcgaacgacctacaccgaactgagatacctacagcgtgagctatgagaaagcgccacgcttcccgaagggagaaaggcggacaggtatccggtaagcggcagggtcggaacaggagagcgcacgagggagcttccagggggaaacgcctggtatctttatagtcctgtcgggtttcgccacctctgacttgagcgtcgatttttgtgatgctcgtcaggggggcggagcctatggaaaaacgccagcaacgcggcctttttacggttcctggccttttgctggccttttgctcacatgttctttcctgcgttatcccctgattctgtggataaccgtattaccgcctttgagtgagctgataccgctcgccgcagccgaacgaccgagcgcagcgagtcagtgagcgaggaagcggaagagcgcccaatacgcaaaccgcctctccccgcgcgttggccgattcattaatgcagctggcacgacaggtttcccgactggaaagcgggcagtgagcgcaacgcaattaatgtgagttagctcactcattaggcaccccaggctttacactttatgcttccggctcgtatgttgtgtggaattgtgagcggataacaatttcacacaggaaacagcatatgcaaacaagcattactctgacatccaacgcatccggtacgtttgacggttactattacgaactctggaaggatactggcaatacaacaatgacggtctacactcaaggtcgcttttcctgccagtggtcgaacatcaataacgcgttgtttaggaccgggaagaaatacaaccagaattggcagtctcttggcacaatccggatcacgtactctgcgacttacaacccaaacgggaactcctacttgtgtatctatggctggtctaccaacccattggtcgagttctacatcgttgagtcctgggggaactggagaccgcctggtgccacgtccctgggccaagtgacaatcgatggcgggacctacgacatctataggacgacacgcgtcaaccagccttgcctgctgccggatgagaaggttattctccctgagcatgggcctattacactcaaggggctcttcgatctcgctaaggagacagtcgtggctgacaacgagaaggagatccgcaagctgggcgccaagctcaccattgtgggcgaggatgggaggctcagggtcctggagagcccatacgtttggaaggtgcggcaccgcggcaagatgctgagggtcaagctcaagaactggcactcagtgtccgtcacgccagagcatcccttcctgaccacgcggggctgggtgcgcgctgaccagctcaagccgggggattacgttgcggtgcccagggtcatccatggcaacgagtcagacgagcggttcgtctccttcgtttacgagaagctcaagaatgatgagctgatcgcgaagctccgcggcgaggtgctgtccaagatttccagcgagttcaagggggacagggcttacaaggttgagaggaacgtgttccggtgggaggacatcgagcgcctcaatctgtgggatgaggtggagagggtcgccttcaccccaaggatgcacaggagcggcaagccactgcattacgtgaagctcccaaggtcgcctgaggagtgggaggctttcttctacttcgctggcgtcatgttcggcgacgggtcccaggataagatcgccaacaatgacgtcgaggtttacgaggagctcaagaagctgtctgttctcggcgtggctgtcaagagggtggagaggacaacttcatacgagatcgagctcaccaacgggaagaatgctctcctgaggctcctgagggtgctgttcgagtacccggagcggcagaaggcgaagtccattagggttccacggatcctgttcattgctcctcgcaagtatgtgtcccgcttcctcaggggctacttcgacgcggatgggcacgtcagcctgaaggacgcgaggatcgaggttacgagcgcttcgcaggagttcctggaggatctcagcctcctgctcctgcggttcggcatcgtgtccaagatctaccgcagcgactacaccacgctcgttatctcgggccgcaggaacctcgatctgttccggcgctacattgggttctctgtcaagaataaggccgaggcgctggagaaggccatcaagaagtcaaggcggtctgagtcataccccattttcgaggagctgaagaggctccggctcctgttcggcttcacacgcactgagctcaacagcaatgtgccattctacgggaagtacgagtcggaggaggccccttcttacgagacactgatgaggatcctcgacgcgattgagaagggctcgatcaacctggataagaagattgctgtcctggaggggcgcatcagggaccataattacattaaggccttcgagaaggacggcctgatcaaggatgggaagctgactgagctcggcagggagctcctggaggtctggaggaacagggagttcgactcgtctgacgtcgattacatccggaacctggcggagaatctcgtcttcatcccggttgaggacattgaggagttcgagtacgagggctacgtttacgacgttactacagagactcataatttcgttgctaatggcatcctcgttcataattccattgtggggacagccacgttcgatcagtactggagcgtgcgcacctctaagcggacttcaggaacagtgaccgtgaccgatcacttccgcgcctgggcgaaccggggcctgaacctcggcacaatagaccaaattacattgtgcgtggagggttaccaaagctctggatcagccaacatcacccagaacaccttctctcagggctcttcttccggcagttcgggtggctcatccggctccacaacgactactcgcatcgagtgtgagaacatgtccttgtccggaccctacgttagcaggatcaccaatccctttaatggtattgcgctgtacgccaacggagacacagcccgcgctaccgttaacttccccgcaagtcgcaactacaatttccgcctgcggggttgcggcaacaacaataatcttgcccgtgtggacctgaggatcgacggacggaccgtcgggaccttttattaccagggcacatacccctgggaggccccaattgacaatgtttatgtcagtgcggggagtcatacagtcgaaatcactgttactgcggataacggcacatgggacgtgtatgccgactacctggtgatacagtgactcgagggggggcccggtacccaattcgccctatagtgagtcgtattacaattcactggccgtcgttttacaacgtcgtgactgggaaaaccctggcgttacccaacttaatcgccttgcagcacatccccctttcgccagctggcgtaatagcgaagaggcccgcaccgatcgcccttcccaacagttgcgcagcctgaatggcgaatggaaattgtaagcgttaatattttgttaaaattcgcgttaaatttttgttaaatcagctcattttttaaccaataggccgaaatcggcaaaatcccttataaatcaaaagaatagaccgagatagggttgagtgttgttccagtttggaacaagagtccactattaaagaacgtggactccaacgtcaaagggcgaaaaaccgtctatcagggcgatggcccactacgtgaaccatcaccctaatcaagttttttggggtcgaggtgccgtaaagcactaaatcggaaccctaaagggagcccccgatttagagcttgacggggaaagccggcgaacgtggcgagaaaggaagggaagaaagcgaaaggagcgggcgctagggcgctggcaagtgtagcggtcacgctgcgcgtaaccaccacacccgccgcgcttaatgcgccgctacagggcgcgtcaggtg

SEQ ID NO: 3144 - DNA, 5405 bp, Artificial Sequence
  Synthetic Construct, AS-144 intein modified protein encoding nucleic acids in pBluescript
gcacttttcggggaaatgtgcgcggaacccctatttgtttatttttctaaatacattcaaatatgtatccgctcatgagacaataaccctgataaatgcttcaataatattgaaaaaggaagagtatgagtattcaacatttccgtgtcgcccttattcccttttttgcggcattttgccttcctgtttttgctcacccagaaacgctggtgaaagtaaaagatgctgaagatcagttgggtgcacgagtgggttacatcgaactggatctcaacagcggtaagatccttgagagttttcgccccgaagaacgttttccaatgatgagcacttttaaagttctgctatgtggcgcggtattatcccgtattgacgccgggcaagagcaactcggtcgccgcatacactattctcagaatgacttggttgagtactcaccagtcacagaaaagcatcttacggatggcatgacagtaagagaattatgcagtgctgccataaccatgagtgataacactgcggccaacttacttctgacaacgatcggaggaccgaaggagctaaccgcttttttgcacaacatgggggatcatgtaactcgccttgatcgttgggaaccggagctgaatgaagccataccaaacgacgagcgtgacaccacgatgcctgtagcaatggcaacaacgttgcgcaaactattaactggcgaactacttactctagcttcccggcaacaattaatagactggatggaggcggataaagttgcaggaccacttctgcgctcggcccttccggctggctggtttattgctgataaatctggagccggtgagcgtgggtctcgcggtatcattgcagcactggggccagatggtaagccctcccgtatcgtagttatctacacgacggggagtcaggcaactatggatgaacgaaatagacagatcgctgagataggtgcctcactgattaagcattggtaactgtcagaccaagtttactcatatatactttagattgatttaaaacttcatttttaatttaaaaggatctaggtgaagatcctttttgataatctcatgaccaaaatcccttaacgtgagttttcgttccactgagcgtcagaccccgtagaaaagatcaaaggatcttcttgagatcctttttttctgcgcgtaatctgctgcttgcaaacaaaaaaaccaccgctaccagcggtggtttgtttgccggatcaagagctaccaactctttttccgaaggtaactggcttcagcagagcgcagataccaaatactgtccttctagtgtagccgtagttaggccaccacttcaagaactctgtagcaccgcctacatacctcgctctgctaatcctgttaccagtggctgctgccagtggcgataagtcgtgtcttaccgggttggactcaagacgatagttaccggataaggcgcagcggtcgggctgaacggggggttcgtgcacacagcccagcttggagcgaacgacctacaccgaactgagatacctacagcgtgagctatgagaaagcgccacgcttcccgaagggagaaaggcggacaggtatccggtaagcggcagggtcggaacaggagagcgcacgagggagcttccagggggaaacgcctggtatctttatagtcctgtcgggtttcgccacctctgacttgagcgtcgatttttgtgatgctcgtcaggggggcggagcctatggaaaaacgccagcaacgcggcctttttacggttcctggccttttgctggccttttgctcacatgttctttcctgcgttatcccctgattctgtggataaccgtattaccgcctttgagtgagctgataccgctcgccgcagccgaacgaccgagcgcagcgagtcagtgagcgaggaagcggaagagcgcccaatacgcaaaccgcctctccccgcgcgttggccgattcattaatgcagctggcacgacaggtttcccgactggaaagcgggcagtgagcgcaacgcaattaatgtgagttagctcactcattaggcaccccaggctttacactttatgcttccggctcgtatgttgtgtggaattgtgagcggataacaatttcacacaggaaacagcatatgcaaacaagcattactctgacatccaacgcatccggtacgtttgacggttactattacgaactctggaaggatactggcaatacaacaatgacggtctacactcaaggtcgcttttcctgccagtggtcgaacatcaataacgcgttgtttaggaccgggaagaaatacaaccagaattggcagtctcttggcacaatccggatcacgtactctgcgacttacaacccaaacgggaactcctacttgtgtatctatggctggtctaccaacccattggtcgagttctacatcgttgagtcctgggggaactggagaccgcctggtgccacgtccctgggccaagtgacaatcgatggcgggacctacgacatctataggacgacacgcgtcaaccagccttgcgtttcgggggactcaaagatcctgacagggaaggggccagtggagatcgggcggctgaactctaacatgatcgcgggcatttggcgcttccagaccgagctggtgcggttcgaggagccacaccgcgttgagtaccgcagggagggcgtgaagatccgcacgaggctcgggttcgagattaaggccaccaaggagcataagttcctcacggtggacgagaacggcgagctgcgctgggtcgaggcttggaagctcaaggagggcaactgggtcggggtggtccggcgcctgccatctcctaatgtgaaggtctcaatcctcgacctcctgccgcccaacgcctacctcaagctgaagggcgagttcctgagggagctcaagctgtcgatccaggcgaagttcggctctattaggacatacgccaagaagaagcgctggtcagagtcctacctcgtcaagcagctgaatggcgtttacccgttcaggtgggagaggctctccgctgtgctgaaggacctcgatctgcgcatgacagagaacgacgtcgagaggatcacttccgataagggcaagtacagcctcccgatcgagttcaccccctcaatggctaggctcctgggcttctggatggctgacgggtcctggaagggcgggaccctcacgctgttctccagcgataggaagatgctggagaagtacaaggagctgtgcaaggaggagttcggcgttgtggggcggatccgcatgctcaacgagtctacatactcactggagatctctttcaatctcctgccggctattttcaagaacctgacaggcaatactgagcgcaagagcaagctcgggactttcccatccatcatctacagcctgcctgaggagcacaagagggagttcctcgcgggctacttcgacggcgatgggttcctggaggttaagggcgggagggtgtactcggctggcttctctaccttcaacaagaggttcgcggagggcatccgggacattctcctgcagctcgggatcgtgtcgtctattagggcccgggagtacgatgaggtccagaagttcaagggccgcgttatccccaagaagggggcttcatacacggtttccgtgctcggcggggagtacctgaagaggttcttcgacgccgtccgcccatggaggtcggattacgagggctgggaggggatgtacaacgagggctacagcaattcggacgtcgttcccaacctcggcaagcgcctgaggagcatcagggagaggctgggcattagcgcttaccgcatgtcgaagatggggttctacaatccagtccgcgttgagctgggcgagagggagatctccaggcggaacctcaggctcctggtggagttctacgagcgggtcgcgaaggagaagcgcgtggaggacgtcctggaggagctgagctacctcagggagctggctgagggcgacgtgttcttcgatcgcatcacgtcggtggagcctgcctacattgatgtcgcgtacggcatcatcaactcggagacagagaactacatcgtggagggcttcatttccaagaactccattgtggggacagccacgttcgatcagtactggagcgtgcgcacctctaagcggacttcaggaacagtgaccgtgaccgatcacttccgcgcctgggcgaaccggggcctgaacctcggcacaatagaccaaattacattgtgcgtggagggttaccaaagctctggatcagccaacatcacccagaacaccttctctcagggctcttcttccggcagttcgggtggctcatccggctccacaacgactactcgcatcgagtgtgagaacatgtccttgtccggaccctacgttagcaggatcaccaatccctttaatggtattgcgctgtacgccaacggagacacagcccgcgctaccgttaacttccccgcaagtcgcaactacaatttccgcctgcggggttgcggcaacaacaataatcttgcccgtgtggacctgaggatcgacggacggaccgtcgggaccttttattaccagggcacatacccctgggaggccccaattgacaatgtttatgtcagtgcggggagtcatacagtcgaaatcactgttactgcggataacggcacatgggacgtgtatgccgactacctggtgatacagtgactcgagggggggcccggtacccaattcgccctatagtgagtcgtattacaattcactggccgtcgttttacaacgtcgtgactgggaaaaccctggcgttacccaacttaatcgccttgcagcacatccccctttcgccagctggcgtaatagcgaagaggcccgcaccgatcgcccttcccaacagttgcgcagcctgaatggcgaatggaaattgtaagcgttaatattttgttaaaattcgcgttaaatttttgttaaatcagctcattttttaaccaataggccgaaatcggcaaaatcccttataaatcaaaagaatagaccgagatagggttgagtgttgttccagtttggaacaagagtccactattaaagaacgtggactccaacgtcaaagggcgaaaaaccgtctatcagggcgatggcccactacgtgaaccatcaccctaatcaagttttttggggtcgaggtgccgtaaagcactaaatcggaaccctaaagggagcccccgatttagagcttgacggggaaagccggcgaacgtggcgagaaaggaagggaagaaagcgaaaggagcgggcgctagggcgctggcaagtgtagcggtcacgctgcgcgtaaccaccacacccgccgcgcttaatgcgccgctacagggcgcgtcaggtg

SEQ ID NO: 3145 - DNA, 5438 bp, Artificial Sequence
  Synthetic Construct, AS-145 intein modified protein encoding nucleic acids in pBluescript
gcacttttcggggaaatgtgcgcggaacccctatttgtttatttttctaaatacattcaaatatgtatccgctcatgagacaataaccctgataaatgcttcaataatattgaaaaaggaagagtatgagtattcaacatttccgtgtcgcccttattcccttttttgcggcattttgccttcctgtttttgctcacccagaaacgctggtgaaagtaaaagatgctgaagatcagttgggtgcacgagtgggttacatcgaactggatctcaacagcggtaagatccttgagagttttcgccccgaagaacgttttccaatgatgagcacttttaaagttctgctatgtggcgcggtattatcccgtattgacgccgggcaagagcaactcggtcgccgcatacactattctcagaatgacttggttgagtactcaccagtcacagaaaagcatcttacggatggcatgacagtaagagaattatgcagtgctgccataaccatgagtgataacactgcggccaacttacttctgacaacgatcggaggaccgaaggagctaaccgcttttttgcacaacatgggggatcatgtaactcgccttgatcgttgggaaccggagctgaatgaagccataccaaacgacgagcgtgacaccacgatgcctgtagcaatggcaacaacgttgcgcaaactattaactggcgaactacttactctagcttcccggcaacaattaatagactggatggaggcggataaagttgcaggaccacttctgcgctcggcccttccggctggctggtttattgctgataaatctggagccggtgagcgtgggtctcgcggtatcattgcagcactggggccagatggtaagccctcccgtatcgtagttatctacacgacggggagtcaggcaactatggatgaacgaaatagacagatcgctgagataggtgcctcactgattaagcattggtaactgtcagaccaagtttactcatatatactttagattgatttaaaacttcatttttaatttaaaaggatctaggtgaagatcctttttgataatctcatgaccaaaatcccttaacgtgagttttcgttccactgagcgtcagaccccgtagaaaagatcaaaggatcttcttgagatcctttttttctgcgcgtaatctgctgcttgcaaacaaaaaaaccaccgctaccagcggtggtttgtttgccggatcaagagctaccaactctttttccgaaggtaactggcttcagcagagcgcagataccaaatactgtccttctagtgtagccgtagttaggccaccacttcaagaactctgtagcaccgcctacatacctcgctctgctaatcctgttaccagtggctgctgccagtggcgataagtcgtgtcttaccgggttggactcaagacgatagttaccggataaggcgcagcggtcgggctgaacggggggttcgtgcacacagcccagcttggagcgaacgacctacaccgaactgagatacctacagcgtgagctatgagaaagcgccacgcttcccgaagggagaaaggcggacaggtatccggtaagcggcagggtcggaacaggagagcgcacgagggagcttccagggggaaacgcctggtatctttatagtcctgtcgggtttcgccacctctgacttgagcgtcgatttttgtgatgctcgtcaggggggcggagcctatggaaaaacgccagcaacgcggcctttttacggttcctggccttttgctggccttttgctcacatgttctttcctgcgttatcccctgattctgtggataaccgtattaccgcctttgagtgagctgataccgctcgccgcagccgaacgaccgagcgcagcgagtcagtgagcgaggaagcggaagagcgcccaatacgcaaaccgcctctccccgcgcgttggccgattcattaatgcagctggcacgacaggtttcccgactggaaagcgggcagtgagcgcaacgcaattaatgtgagttagctcactcattaggcaccccaggctttacactttatgcttccggctcgtatgttgtgtggaattgtgagcggataacaatttcacacaggaaacagcatatgcaaacaagcattactctgacatccaacgcatccggtacgtttgacggttactattacgaactctggaaggatactggcaatacaacaatgacggtctacactcaaggtcgcttttcctgccagtggtcgaacatcaataacgcgttgtttaggaccgggaagaaatacaaccagaattggcagtctcttggcacaatccggatcacgtactctgcgacttacaacccaaacgggaactcctacttgtgtatctatggctggtctaccaacccattggtcgagttctacatcgttgagtcctgggggaactggagaccgcctggtgccacgtccctgggccaagtgacaatcgatggcgggacctacgacatctataggacgacacgcgtcaaccagccttctattctgcctgaggagtggctgcctgttctggaggagggggaggttcatttcgttaggatcggggagctgattgaccgcatgatggaggagaacgctggcaaggtcaagagggagggggagaccgaggtcctggaggtttcaggcctggaggtgccgtccttcaaccgcaggacgaataaggcggagctgaagagggtcaaggctctcatccggcacgactactctggcaaggtgtacaccattaggctgaagtcaggccggcgcatcaagattacgtcagggcattccctgttcagcgtccggaacggcgagctcgttgaggtgaccggcgacgagctgaagccaggggatctcgtcgctgttccaaggaggctggagctgccagagaggaaccacgtcctcaatctggttgagctcctgctcggcacaccggaggaggagactctggacatcgtgatgacgattcccgtcaagggcaagaagaacttcttcaaggggatgctcaggacactgcggtggatcttcggcgaggagaagaggccaaggactgctcgcaggtacctcaggcatctggaggacctcggctacgtgcggctcaagaagatcgggtacgaggtcctggactgggatagcctcaagaattaccggcgcctgtacgaggctctcgtggagaacgtccgctacaacggcaataagagggagtacctggttgagttcaattcgatccgcgacgccgtggggattatgccgctgaaggagctcaaggagtggaagatcggcacactcaacgggttccggatgcgcaagctgattgaggtcgatgagtccctcgccaagctgctcggctactacgtgagcgaggggtacgcgcgcaagcagaggaacccgaagaatggctggtcgtactctgtcaagctgtacaatgaggaccccgaggttctggacgatatggagcggctcgcgagccgcttcttcggcaaggttaggcgggggaggaactacgtggagatccccaagaagattggctacctgctcttcgagaatatgtgcggggtgctcgctgagaacaagcgcatcccagagttcgtcttcacatcacctaagggcgttaggctggccttcctggaggggtactccagcgctatggctacctccacggagcaggagactcaggcgctgaacgagaagcgcgctctggccaatcagctcgttctgctcctgaactcggtgggcgtctctgctgtgaagctcggccacgactccggggtttacagggtgtacatcaatgaggagctgccattcgtcaagctcgataagaagaagaacgcttactacagccatgtgattcctaaggaggtcctctcggaggtcttcggcaaggttttccagaagaacgtgtccccacagaccttccggaagatggtcgaggacggcaggctggatcctgagaaggctcagaggctgtcgtggctcatcgagggggacgtggtcctcgatcgcgtcgagtctgttgacgtggaggactacgatggctacgtgtacgatctctctgtggaggataatgagaacttcctcgtgggcttcgggctcgtttacgctcataattccattgtggggacagccacgttcgatcagtactggagcgtgcgcacctctaagcggacttcaggaacagtgaccgtgaccgatcacttccgcgcctgggcgaaccggggcctgaacctcggcacaatagaccaaattacattgtgcgtggagggttaccaaagctctggatcagccaacatcacccagaacaccttctctcagggctcttcttccggcagttcgggtggctcatccggctccacaacgactactcgcatcgagtgtgagaacatgtccttgtccggaccctacgttagcaggatcaccaatccctttaatggtattgcgctgtacgccaacggagacacagcccgcgctaccgttaacttccccgcaagtcgcaactacaatttccgcctgcggggttgcggcaacaacaataatcttgcccgtgtggacctgaggatcgacggacggaccgtcgggaccttttattaccagggcacatacccctgggaggccccaattgacaatgtttatgtcagtgcggggagtcatacagtcgaaatcactgttactgcggataacggcacatgggacgtgtatgccgactacctggtgatacagtgactcgagggggggcccggtacccaattcgccctatagtgagtcgtattacaattcactggccgtcgttttacaacgtcgtgactgggaaaaccctggcgttacccaacttaatcgccttgcagcacatccccctttcgccagctggcgtaatagcgaagaggcccgcaccgatcgcccttcccaacagttgcgcagcctgaatggcgaatggaaattgtaagcgttaatattttgttaaaattcgcgttaaatttttgttaaatcagctcattttttaaccaataggccgaaatcggcaaaatcccttataaatcaaaagaatagaccgagatagggttgagtgttgttccagtttggaacaagagtccactattaaagaacgtggactccaacgtcaaagggcgaaaaaccgtctatcagggcgatggcccactacgtgaaccatcaccctaatcaagttttttggggtcgaggtgccgtaaagcactaaatcggaaccctaaagggagcccccgatttagagcttgacggggaaagccggcgaacgtggcgagaaaggaagggaagaaagcgaaaggagcgggcgctagggcgctggcaagtgtagcggtcacgctgcgcgtaaccaccacacccgccgcgcttaatgcgccgctacagggcgcgtcaggtg

SEQ ID NO: 3146 - DNA, 5276 bp, Artificial Sequence
  Synthetic Construct, AS-146 intein modified protein encoding nucleic acids in pBluescript
gcacttttcggggaaatgtgcgcggaacccctatttgtttatttttctaaatacattcaaatatgtatccgctcatgagacaataaccctgataaatgcttcaataatattgaaaaaggaagagtatgagtattcaacatttccgtgtcgcccttattcccttttttgcggcattttgccttcctgtttttgctcacccagaaacgctggtgaaagtaaaagatgctgaagatcagttgggtgcacgagtgggttacatcgaactggatctcaacagcggtaagatccttgagagttttcgccccgaagaacgttttccaatgatgagcacttttaaagttctgctatgtggcgcggtattatcccgtattgacgccgggcaagagcaactcggtcgccgcatacactattctcagaatgacttggttgagtactcaccagtcacagaaaagcatcttacggatggcatgacagtaagagaattatgcagtgctgccataaccatgagtgataacactgcggccaacttacttctgacaacgatcggaggaccgaaggagctaaccgcttttttgcacaacatgggggatcatgtaactcgccttgatcgttgggaaccggagctgaatgaagccataccaaacgacgagcgtgacaccacgatgcctgtagcaatggcaacaacgttgcgcaaactattaactggcgaactacttactctagcttcccggcaacaattaatagactggatggaggcggataaagttgcaggaccacttctgcgctcggcccttccggctggctggtttattgctgataaatctggagccggtgagcgtgggtctcgcggtatcattgcagcactggggccagatggtaagccctcccgtatcgtagttatctacacgacggggagtcaggcaactatggatgaacgaaatagacagatcgctgagataggtgcctcactgattaagcattggtaactgtcagaccaagtttactcatatatactttagattgatttaaaacttcatttttaatttaaaaggatctaggtgaagatcctttttgataatctcatgaccaaaatcccttaacgtgagttttcgttccactgagcgtcagaccccgtagaaaagatcaaaggatcttcttgagatcctttttttctgcgcgtaatctgctgcttgcaaacaaaaaaaccaccgctaccagcggtggtttgtttgccggatcaagagctaccaactctttttccgaaggtaactggcttcagcagagcgcagataccaaatactgtccttctagtgtagccgtagttaggccaccacttcaagaactctgtagcaccgcctacatacctcgctctgctaatcctgttaccagtggctgctgccagtggcgataagtcgtgtcttaccgggttggactcaagacgatagttaccggataaggcgcagcggtcgggctgaacggggggttcgtgcacacagcccagcttggagcgaacgacctacaccgaactgagatacctacagcgtgagctatgagaaagcgccacgcttcccgaagggagaaaggcggacaggtatccggtaagcggcagggtcggaacaggagagcgcacgagggagcttccagggggaaacgcctggtatctttatagtcctgtcgggtttcgccacctctgacttgagcgtcgatttttgtgatgctcgtcaggggggcggagcctatggaaaaacgccagcaacgcggcctttttacggttcctggccttttgctggccttttgctcacatgttctttcctgcgttatcccctgattctgtggataaccgtattaccgcctttgagtgagctgataccgctcgccgcagccgaacgaccgagcgcagcgagtcagtgagcgaggaagcggaagagcgcccaatacgcaaaccgcctctccccgcgcgttggccgattcattaatgcagctggcacgacaggtttcccgactggaaagcgggcagtgagcgcaacgcaattaatgtgagttagctcactcattaggcaccccaggctttacactttatgcttccggctcgtatgttgtgtggaattgtgagcggataacaatttcacacaggaaacagcatatgcaaacaagcattactctgacatccaacgcatccggtacgtttgacggttactattacgaactctggaaggatactggcaatacaacaatgacggtctacactcaaggtcgcttttcctgccagtggtcgaacatcaataacgcgttgtttaggaccgggaagaaatacaaccagaattggcagtctcttggcacaatccggatcacgtactctgcgacttacaacccaaacgggaactcctacttgtgtatctatggctggtctaccaacccattggtcgagttctacatcgttgagtcctgggggaactggagaccgcctggtgccacgtccctgggccaagtgacaatcgatggcgggacctacgacatctataggacgacacgcgtcaaccagccttgcttcgctaaggacactaaggtctactacgagaatgacacactggttcatttcgagtcaattgaggacatgtaccataagtacgcttctctcgggagggaggtgccattcgacaacggctacgctgtcccactggagaccgtgtcagtctacacgttcgatccgaagacaggcgaggttaagaggacgaaggctagctacatctaccgggagaaggtggagaagctcgccgagatccgcctgtcgaacggctacctcctgaggattacactcctgcaccccgttctcgtgttccggaatggcctgcagtgggtgccagctggcatgatcaagcctggggacctcatcgtcggcattcgctcggttccagcgaacgccgcgactattgaggagtctgaggcctacttcctcgggctgttcgtggctgagggcacctcaaatcctctctccatcaccacgggctccgaggagctgaaggacttcatcgtcagcttcattgaggaccatgatgggtacacaccaactgtcgaggttcgcaggggcctctaccggatcctgttccgcaagaagacggctgagtggctcggcgagctggctacttcgaacgcctctaccaaggtggtccctgagagggtcctcaatgcgggggagtccgctatcgctgccttcctcgctggctacctggacggcgatgggtacctcactgagtctattgtggagctggtcaccaagtcacgggagctcgctgacgggctggtgttcctcctgaagcgcctgggcatcacgccgaggattagccagaagacaatcgaggggtcggtctactaccggatctacattacgggcgaggatcgcaagacattcgagaaggtcctggagaagtccaggatcaagccaggggagatgaacgagggcggggttggcaggtacccaccagctctgggcaagttcctcgggaagctgtacagcgagttcaggctccccaagcgggacaacgagactgcgtaccacatcctgaccaggtcacggaatgtgtggttcaccgagaagacgctctcccggattgaggagtacttcagggaggctctggagaagctgtcggaggctaggaaggctctggagatgggcgacaagccggagctgccattcccttggacagcgatcactaagtacgggttcacggatcgccaggtcgctaactacaggacaaggggcctcccaaagaggccagagctgaaggagaaggttgtgtccgccctcctgaaggagatcgagaggctggagggcgtggctaagctcgctctggagaccattgagctcgctaggcgcctggagttccatgaggtttccagcgtggaggtcgttgactacaatgattgggtctacgatctcgtcattccagagactcataacttcattgctccaaatgggctcgtgctccacaactccattgtggggacagccacgttcgatcagtactggagcgtgcgcacctctaagcggacttcaggaacagtgaccgtgaccgatcacttccgcgcctgggcgaaccggggcctgaacctcggcacaatagaccaaattacattgtgcgtggagggttaccaaagctctggatcagccaacatcacccagaacaccttctctcagggctcttcttccggcagttcgggtggctcatccggctccacaacgactactcgcatcgagtgtgagaacatgtccttgtccggaccctacgttagcaggatcaccaatccctttaatggtattgcgctgtacgccaacggagacacagcccgcgctaccgttaacttccccgcaagtcgcaactacaatttccgcctgcggggttgcggcaacaacaataatcttgcccgtgtggacctgaggatcgacggacggaccgtcgggaccttttattaccagggcacatacccctgggaggccccaattgacaatgtttatgtcagtgcggggagtcatacagtcgaaatcactgttactgcggataacggcacatgggacgtgtatgccgactacctggtgatacagtgactcgagggggggcccggtacccaattcgccctatagtgagtcgtattacaattcactggccgtcgttttacaacgtcgtgactgggaaaaccctggcgttacccaacttaatcgccttgcagcacatccccctttcgccagctggcgtaatagcgaagaggcccgcaccgatcgcccttcccaacagttgcgcagcctgaatggcgaatggaaattgtaagcgttaatattttgttaaaattcgcgttaaatttttgttaaatcagctcattttttaaccaataggccgaaatcggcaaaatcccttataaatcaaaagaatagaccgagatagggttgagtgttgttccagtttggaacaagagtccactattaaagaacgtggactccaacgtcaaagggcgaaaaaccgtctatcagggcgatggcccactacgtgaaccatcaccctaatcaagttttttggggtcgaggtgccgtaaagcactaaatcggaaccctaaagggagcccccgatttagagcttgacggggaaagccggcgaacgtggcgagaaaggaagggaagaaagcgaaaggagcgggcgctagggcgctggcaagtgtagcggtcacgctgcgcgtaaccaccacacccgccgcgcttaatgcgccgctacagggcgcgtcaggtg

SEQ ID NO: 3147 - DNA, 5297 bp, Artificial Sequence
  Synthetic Construct, AS-147 intein modified protein encoding nucleic acids in pBluescript
gcacttttcggggaaatgtgcgcggaacccctatttgtttatttttctaaatacattcaaatatgtatccgctcatgagacaataaccctgataaatgcttcaataatattgaaaaaggaagagtatgagtattcaacatttccgtgtcgcccttattcccttttttgcggcattttgccttcctgtttttgctcacccagaaacgctggtgaaagtaaaagatgctgaagatcagttgggtgcacgagtgggttacatcgaactggatctcaacagcggtaagatccttgagagttttcgccccgaagaacgttttccaatgatgagcacttttaaagttctgctatgtggcgcggtattatcccgtattgacgccgggcaagagcaactcggtcgccgcatacactattctcagaatgacttggttgagtactcaccagtcacagaaaagcatcttacggatggcatgacagtaagagaattatgcagtgctgccataaccatgagtgataacactgcggccaacttacttctgacaacgatcggaggaccgaaggagctaaccgcttttttgcacaacatgggggatcatgtaactcgccttgatcgttgggaaccggagctgaatgaagccataccaaacgacgagcgtgacaccacgatgcctgtagcaatggcaacaacgttgcgcaaactattaactggcgaactacttactctagcttcccggcaacaattaatagactggatggaggcggataaagttgcaggaccacttctgcgctcggcccttccggctggctggtttattgctgataaatctggagccggtgagcgtgggtctcgcggtatcattgcagcactggggccagatggtaagccctcccgtatcgtagttatctacacgacggggagtcaggcaactatggatgaacgaaatagacagatcgctgagataggtgcctcactgattaagcattggtaactgtcagaccaagtttactcatatatactttagattgatttaaaacttcatttttaatttaaaaggatctaggtgaagatcctttttgataatctcatgaccaaaatcccttaacgtgagttttcgttccactgagcgtcagaccccgtagaaaagatcaaaggatcttcttgagatcctttttttctgcgcgtaatctgctgcttgcaaacaaaaaaaccaccgctaccagcggtggtttgtttgccggatcaagagctaccaactctttttccgaaggtaactggcttcagcagagcgcagataccaaatactgtccttctagtgtagccgtagttaggccaccacttcaagaactctgtagcaccgcctacatacctcgctctgctaatcctgttaccagtggctgctgccagtggcgataagtcgtgtcttaccgggttggactcaagacgatagttaccggataaggcgcagcggtcgggctgaacggggggttcgtgcacacagcccagcttggagcgaacgacctacaccgaactgagatacctacagcgtgagctatgagaaagcgccacgcttcccgaagggagaaaggcggacaggtatccggtaagcggcagggtcggaacaggagagcgcacgagggagcttccagggggaaacgcctggtatctttatagtcctgtcgggtttcgccacctctgacttgagcgtcgatttttgtgatgctcgtcaggggggcggagcctatggaaaaacgccagcaacgcggcctttttacggttcctggccttttgctggccttttgctcacatgttctttcctgcgttatcccctgattctgtggataaccgtattaccgcctttgagtgagctgataccgctcgccgcagccgaacgaccgagcgcagcgagtcagtgagcgaggaagcggaagagcgcccaatacgcaaaccgcctctccccgcgcgttggccgattcattaatgcagctggcacgacaggtttcccgactggaaagcgggcagtgagcgcaacgcaattaatgtgagttagctcactcattaggcaccccaggctttacactttatgcttccggctcgtatgttgtgtggaattgtgagcggataacaatttcacacaggaaacagcatatgcaaacaagcattactctgacatccaacgcatccggtacgtttgacggttactattacgaactctggaaggatactggcaatacaacaatgacggtctacactcaaggtcgcttttcctgccagtggtcgaacatcaataacgcgttgtttaggaccgggaagaaatacaaccagaattggcagtctcttggcacaatccggatcacgtactctgcgacttacaacccaaacgggaactcctacttgtgtatctatggctggtctaccaacccattggtcgagttctacatcgttgagtcctgggggaactggagaccgcctggtgccacgtccctgggccaagtgacaatcgatggcgggacctacgacatctataggacgacacgcgtcaaccagccttgcgttacccctgacacactcgtttcgctcgctgacgggcggattatggagatcaaggatgcggtggagaagtcggagggcaatctgctcagcgtgaacggcctgaagccgaaggaggccaaggcgctcaagttctgggagatcgactggaacgggcccctcaaggtcatcaagctgaagaatggccacgagattaaggccacgccagaccatgggctcctggtcatgagggagggcaagctggggtgggtttcggcgaagaacgtgagggagggcgactacgtcgctttcgcttacaataccggccacagggggagggatgagtacacgctcctgaagctcatgatcaagctgggcattaccgacgtgatggtcgagctcgatgaggagtacttcaacgagaaggttgcccctatcgtgagggagcggatttccacaagcactaagtacaagtacctgaggaggagggtcctcccactgtacctcctgcaggagtggggcctggacgattacgaggcccatgttaagtccctctacaggcagagggctggcagcaagccaatccccaatttcaagctcgacggcaggttctggtatgtgttcgggctcgttctgggcgacgggacactccgcgatagcaaggtgctgatctcgcagactccactcaaggacgtcaagtccgttctggaggatgtcttccctttcctcagggttttcgagaccacgaaccaggttggcttctccaactccatcatcgctgaggtgttccgcaggctcggcgctaggaaggggaagctccacccactggtcttcggcctgagggaggagtacatcaacgcgatgattgctggctacttcgacaccgatgggacgttctctatcctcaacgacaggaagggcccaaatttccgggggatcctgacatcaaagcggggcgatgtgctccgcatgctgtccgtctacctgtaccagatcggcattatgaactacctcaggagggacgagaggaccggggtgtgggatctgatcatttcaaatcgctccctggagaagttcagggagaagatctacccgtacctccggattaggcgggctcagttcgacgaggcctactctgtctacagggcctcacgcagggctttcgagggcgatctcctgccagtggcccctgtcttcggcaagctgaagttcaagaacgggacaaagaatcgcatcctcaaggagactggcattgacgtgtggaactggctgaagaggccagagggggagatcccccgcgataagctctccaaggtcctggagtacgctgaggagtcgcccgagaaggagttcctcaagtctctggtggaggcgggcgtcacctgggttaaggtgaagggggtggaggaggagctgtacacgggcaagctctacgacttcacaactactacggagaatttcctctcaaatggggctgtttctcataattccattgtggggacagccacgttcgatcagtactggagcgtgcgcacctctaagcggacttcaggaacagtgaccgtgaccgatcacttccgcgcctgggcgaaccggggcctgaacctcggcacaatagaccaaattacattgtgcgtggagggttaccaaagctctggatcagccaacatcacccagaacaccttctctcagggctcttcttccggcagttcgggtggctcatccggctccacaacgactactcgcatcgagtgtgagaacatgtccttgtccggaccctacgttagcaggatcaccaatccctttaatggtattgcgctgtacgccaacggagacacagcccgcgctaccgttaacttccccgcaagtcgcaactacaatttccgcctgcggggttgcggcaacaacaataatcttgcccgtgtggacctgaggatcgacggacggaccgtcgggaccttttattaccagggcacatacccctgggaggccccaattgacaatgtttatgtcagtgcggggagtcatacagtcgaaatcactgttactgcggataacggcacatgggacgtgtatgccgactacctggtgatacagtgactcgagggggggcccggtacccaattcgccctatagtgagtcgtattacaattcactggccgtcgttttacaacgtcgtgactgggaaaaccctggcgttacccaacttaatcgccttgcagcacatccccctttcgccagctggcgtaatagcgaagaggcccgcaccgatcgcccttcccaacagttgcgcagcctgaatggcgaatggaaattgtaagcgttaatattttgttaaaattcgcgttaaatttttgttaaatcagctcattttttaaccaataggccgaaatcggcaaaatcccttataaatcaaaagaatagaccgagatagggttgagtgttgttccagtttggaacaagagtccactattaaagaacgtggactccaacgtcaaagggcgaaaaaccgtctatcagggcgatggcccactacgtgaaccatcaccctaatcaagttttttggggtcgaggtgccgtaaagcactaaatcggaaccctaaagggagcccccgatttagagcttgacggggaaagccggcgaacgtggcgagaaaggaagggaagaaagcgaaaggagcgggcgctagggcgctggcaagtgtagcggtcacgctgcgcgtaaccaccacacccgccgcgcttaatgcgccgctacagggcgcgtcaggtg

SEQ ID NO: 3148 - DNA, 5192 bp, Artificial Sequence
  Synthetic Construct, AS-148 intein modified protein encoding nucleic acids in pBluescript
gcacttttcggggaaatgtgcgcggaacccctatttgtttatttttctaaatacattcaaatatgtatccgctcatgagacaataaccctgataaatgcttcaataatattgaaaaaggaagagtatgagtattcaacatttccgtgtcgcccttattcccttttttgcggcattttgccttcctgtttttgctcacccagaaacgctggtgaaagtaaaagatgctgaagatcagttgggtgcacgagtgggttacatcgaactggatctcaacagcggtaagatccttgagagttttcgccccgaagaacgttttccaatgatgagcacttttaaagttctgctatgtggcgcggtattatcccgtattgacgccgggcaagagcaactcggtcgccgcatacactattctcagaatgacttggttgagtactcaccagtcacagaaaagcatcttacggatggcatgacagtaagagaattatgcagtgctgccataaccatgagtgataacactgcggccaacttacttctgacaacgatcggaggaccgaaggagctaaccgcttttttgcacaacatgggggatcatgtaactcgccttgatcgttgggaaccggagctgaatgaagccataccaaacgacgagcgtgacaccacgatgcctgtagcaatggcaacaacgttgcgcaaactattaactggcgaactacttactctagcttcccggcaacaattaatagactggatggaggcggataaagttgcaggaccacttctgcgctcggcccttccggctggctggtttattgctgataaatctggagccggtgagcgtgggtctcgcggtatcattgcagcactggggccagatggtaagccctcccgtatcgtagttatctacacgacggggagtcaggcaactatggatgaacgaaatagacagatcgctgagataggtgcctcactgattaagcattggtaactgtcagaccaagtttactcatatatactttagattgatttaaaacttcatttttaatttaaaaggatctaggtgaagatcctttttgataatctcatgaccaaaatcccttaacgtgagttttcgttccactgagcgtcagaccccgtagaaaagatcaaaggatcttcttgagatcctttttttctgcgcgtaatctgctgcttgcaaacaaaaaaaccaccgctaccagcggtggtttgtttgccggatcaagagctaccaactctttttccgaaggtaactggcttcagcagagcgcagataccaaatactgtccttctagtgtagccgtagttaggccaccacttcaagaactctgtagcaccgcctacatacctcgctctgctaatcctgttaccagtggctgctgccagtggcgataagtcgtgtcttaccgggttggactcaagacgatagttaccggataaggcgcagcggtcgggctgaacggggggttcgtgcacacagcccagcttggagcgaacgacctacaccgaactgagatacctacagcgtgagctatgagaaagcgccacgcttcccgaagggagaaaggcggacaggtatccggtaagcggcagggtcggaacaggagagcgcacgagggagcttccagggggaaacgcctggtatctttatagtcctgtcgggtttcgccacctctgacttgagcgtcgatttttgtgatgctcgtcaggggggcggagcctatggaaaaacgccagcaacgcggcctttttacggttcctggccttttgctggccttttgctcacatgttctttcctgcgttatcccctgattctgtggataaccgtattaccgcctttgagtgagctgataccgctcgccgcagccgaacgaccgagcgcagcgagtcagtgagcgaggaagcggaagagcgcccaatacgcaaaccgcctctccccgcgcgttggccgattcattaatgcagctggcacgacaggtttcccgactggaaagcgggcagtgagcgcaacgcaattaatgtgagttagctcactcattaggcaccccaggctttacactttatgcttccggctcgtatgttgtgtggaattgtgagcggataacaatttcacacaggaaacagcatatgcaaacaagcattactctgacatccaacgcatccggtacgtttgacggttactattacgaactctggaaggatactggcaatacaacaatgacggtctacactcaaggtcgcttttcctgccagtggtcgaacatcaataacgcgttgtttaggaccgggaagaaatacaaccagaattggcagtctcttggcacaatccggatcacgtactctgcgacttacaacccaaacgggaactcctacttgtgtatctatggctggtctaccaacccattggtcgagttctacatcgttgagtcctgggggaactggagaccgcctggtgccacgtccctgggccaagtgacaatcgatggcgggacctacgacatctataggacgacacgcgtcaaccagccttgcatcgatggcaacgctaagattattttcgagaatgacggggaggagcatattatgacaatggcggagatgtacgagcgctacaaggatctgggcgagttctacgacccggagtacaaccggtgggggatcaatgtggaggaggttccggtctacgtgaagtcattcgatccctccaccaaggagattacgaagggcaaggtgaaggtcatctggaagtacgagctcggggaggacgttcccaagtacgagatcaagacaaacaagggcactagggtcctcacctcgccatggcaccctttcttcgtcattacgcaggatctgaagatcgttgagaagcgggctgatgagctcagggagggcgacatgctggtcggcgggatgccatctgacgatgactacgagttcctcctggactactggctcgccggcttcattgcgggcgatgggagcatcgacaagtaccgctcgcacgttaagggccatgagtatgtgtacgatcggctgcgcatctacgactacaccacggagacgctcggcatcattaacgaccacctggagaagacattcgggaagaggtactccctccagagggatcggaatatccactacatcgacattaaggccaagggcattactagccattacatcgagctcctgcgcggcatcaccaacgggattccgcagcccatcctgaaggagggcaggaatgctgtgctctctttcatcacgggcctgttcgatgccgaggggcatgtcaactcaaagccaggcgtggagctcgggatggtcaataggaagctgatcgaggacattacatactacctcaacagcctgggcatcaaggcgcgcatgaggaagaagcctcggaaggatggggtggactacgtcatgcacgttgaggagtactccagcctcctgcggttctacgagctcattggcaagaacctgcagaactccgagaagcgcatcaagctggaggagctcctgtctaagcataacggcgggtcattcggcctcaccctgtccttcgaggacttcaaggcgtggtcgtctaagtacggcgtggagttcaagacgaacgggtcccagacactcgctatcattaagaatgagaaggtgagcctgggccagtggcacaggagggggagggtctcgaaggctgtcctcgttaagatgctccggaagctgtacgatacaactaagtccgaggacgtgaagcgcatgctccatctgattgagggcctggaggtggtcaaggagatcaacgtcactaatgagccaaagaccttctacgacctgactgtggagcgctaccagaactacctcgccggggagaatggcatggttttcgtgcataattccattgtggggacagccacgttcgatcagtactggagcgtgcgcacctctaagcggacttcaggaacagtgaccgtgaccgatcacttccgcgcctgggcgaaccggggcctgaacctcggcacaatagaccaaattacattgtgcgtggagggttaccaaagctctggatcagccaacatcacccagaacaccttctctcagggctcttcttccggcagttcgggtggctcatccggctccacaacgactactcgcatcgagtgtgagaacatgtccttgtccggaccctacgttagcaggatcaccaatccctttaatggtattgcgctgtacgccaacggagacacagcccgcgctaccgttaacttccccgcaagtcgcaactacaatttccgcctgcggggttgcggcaacaacaataatcttgcccgtgtggacctgaggatcgacggacggaccgtcgggaccttttattaccagggcacatacccctgggaggccccaattgacaatgtttatgtcagtgcggggagtcatacagtcgaaatcactgttactgcggataacggcacatgggacgtgtatgccgactacctggtgatacagtgactcgagggggggcccggtacccaattcgccctatagtgagtcgtattacaattcactggccgtcgttttacaacgtcgtgactgggaaaaccctggcgttacccaacttaatcgccttgcagcacatccccctttcgccagctggcgtaatagcgaagaggcccgcaccgatcgcccttcccaacagttgcgcagcctgaatggcgaatggaaattgtaagcgttaatattttgttaaaattcgcgttaaatttttgttaaatcagctcattttttaaccaataggccgaaatcggcaaaatcccttataaatcaaaagaatagaccgagatagggttgagtgttgttccagtttggaacaagagtccactattaaagaacgtggactccaacgtcaaagggcgaaaaaccgtctatcagggcgatggcccactacgtgaaccatcaccctaatcaagttttttggggtcgaggtgccgtaaagcactaaatcggaaccctaaagggagcccccgatttagagcttgacggggaaagccggcgaacgtggcgagaaaggaagggaagaaagcgaaaggagcgggcgctagggcgctggcaagtgtagcggtcacgctgcgcgtaaccaccacacccgccgcgcttaatgcgccgctacagggcgcgtcaggtg

SEQ ID NO: 3149 - DNA, 5363 bp, Artificial Sequence
  Synthetic Construct, AS-149 intein modified protein encoding nucleic acids in pBluescript
gcacttttcggggaaatgtgcgcggaacccctatttgtttatttttctaaatacattcaaatatgtatccgctcatgagacaataaccctgataaatgcttcaataatattgaaaaaggaagagtatgagtattcaacatttccgtgtcgcccttattcccttttttgcggcattttgccttcctgtttttgctcacccagaaacgctggtgaaagtaaaagatgctgaagatcagttgggtgcacgagtgggttacatcgaactggatctcaacagcggtaagatccttgagagttttcgccccgaagaacgttttccaatgatgagcacttttaaagttctgctatgtggcgcggtattatcccgtattgacgccgggcaagagcaactcggtcgccgcatacactattctcagaatgacttggttgagtactcaccagtcacagaaaagcatcttacggatggcatgacagtaagagaattatgcagtgctgccataaccatgagtgataacactgcggccaacttacttctgacaacgatcggaggaccgaaggagctaaccgcttttttgcacaacatgggggatcatgtaactcgccttgatcgttgggaaccggagctgaatgaagccataccaaacgacgagcgtgacaccacgatgcctgtagcaatggcaacaacgttgcgcaaactattaactggcgaactacttactctagcttcccggcaacaattaatagactggatggaggcggataaagttgcaggaccacttctgcgctcggcccttccggctggctggtttattgctgataaatctggagccggtgagcgtgggtctcgcggtatcattgcagcactggggccagatggtaagccctcccgtatcgtagttatctacacgacggggagtcaggcaactatggatgaacgaaatagacagatcgctgagataggtgcctcactgattaagcattggtaactgtcagaccaagtttactcatatatactttagattgatttaaaacttcatttttaatttaaaaggatctaggtgaagatcctttttgataatctcatgaccaaaatcccttaacgtgagttttcgttccactgagcgtcagaccccgtagaaaagatcaaaggatcttcttgagatcctttttttctgcgcgtaatctgctgcttgcaaacaaaaaaaccaccgctaccagcggtggtttgtttgccggatcaagagctaccaactctttttccgaaggtaactggcttcagcagagcgcagataccaaatactgtccttctagtgtagccgtagttaggccaccacttcaagaactctgtagcaccgcctacatacctcgctctgctaatcctgttaccagtggctgctgccagtggcgataagtcgtgtcttaccgggttggactcaagacgatagttaccggataaggcgcagcggtcgggctgaacggggggttcgtgcacacagcccagcttggagcgaacgacctacaccgaactgagatacctacagcgtgagctatgagaaagcgccacgcttcccgaagggagaaaggcggacaggtatccggtaagcggcagggtcggaacaggagagcgcacgagggagcttccagggggaaacgcctggtatctttatagtcctgtcgggtttcgccacctctgacttgagcgtcgatttttgtgatgctcgtcaggggggcggagcctatggaaaaacgccagcaacgcggcctttttacggttcctggccttttgctggccttttgctcacatgttctttcctgcgttatcccctgattctgtggataaccgtattaccgcctttgagtgagctgataccgctcgccgcagccgaacgaccgagcgcagcgagtcagtgagcgaggaagcggaagagcgcccaatacgcaaaccgcctctccccgcgcgttggccgattcattaatgcagctggcacgacaggtttcccgactggaaagcgggcagtgagcgcaacgcaattaatgtgagttagctcactcattaggcaccccaggctttacactttatgcttccggctcgtatgttgtgtggaattgtgagcggataacaatttcacacaggaaacagcatatgcaaacaagcattactctgacatccaacgcatccggtacgtttgacggttactattacgaactctggaaggatactggcaatacaacaatgacggtctacactcaaggtcgcttttcctgccagtggtcgaacatcaataacgcgttgtttaggaccgggaagaaatacaaccagaattggcagtctcttggcacaatccggatcacgtactctgcgacttacaacccaaacgggaactcctacttgtgtatctatggctggtctaccaacccattggtcgagttctacatcgttgagtcctgggggaactggagaccgcctggtgccacgtccctgggccaagtgacaatcgatggcgggacctacgacatctataggacgacacgcgtcaaccagccttgcctgcatccggactcactcattcctacgcctcagggggttaagcgcatcaaggagctgccggagaagggggaggtcttcgctctcgacttcgatctcaagctgtcacgggcgaggtacaggctcctggagagggacgctgatgagcccatgtacaaggtgacactctccgacaggactgagctctacctgaccgcggatcacccggtcctcgtttacagggacgatcagctgatcttcgtccccgctgaggagctccgggagaacgaccaggtggtcctgttcattaatcgctcagagtactccccaaggaccgagtcgcctacgctcctgggcttcctcctggagaacgccacctctatgaaggactacatcctctacgatccagagttcggcggggtgctgaggaatcgcattaaggacgcgggcctcaagactgagatcctgtggaggttccggattcgcgagcccacctactacaagtacctccgcggcaagatgccggttcccatcgtgaggttcctcctggaggagggcgttgtgagcattgaggagctccgggaggtgttccgcgggttctcgtactctacatcactgactccaatcagcttcgagttctcggaggagttctggtacctcttcggcctggtcgctggcgacgggcacctggctaagaagggggctatcaccattccagccaaggaccgcaccgaggatacggtcaaggcggttaaggagatcgctaactccctccaggtgcctttcgccttcgacgagaagtacaagatgatcattctgcggtccaagagcctcacgaggctgttcgagctcctgggctgcccgtacgggaacaagacagagatcttcaggattccgggcgagatcatggcgaagccagagtggatggctgcgttcctcgctggctactacgacgcggatggccacatcgggacaaagccaactggcgggaagaagtcgcattctcctcagatcgtcctgacgagcaagaaccgcatggccatctacacagtcaagcagatgtggcagctcctgggcgttgggacgtacctctgggagaagaaggacaggaacggcaatttcatggcctacgagctgaaggtgtactcccgcgacgcgtggcggttctacgaggtcatgaagaaccacctccgcatcaagaggaaggacctggagcatgtgaaggaggtcgctattaggaagcggaaggcctactctcaccattactcagttctcaatgtgaagtcttgggagggcaagatcaagtccagcaacgttctgtggaagaagttcgacatgtccaatcagaccgctcacggcagggggatcagcctcgacaagctgcagcgcattgtcgattacctcaccgacacggatctgcgcaggatcgcgatgggcgatgtctacgtgctggggatcaggtccattgagaagttccattaccggggcaaggtgtacgatctcgtcgtggatcagtaccacaacttcattgctaatggggtcgtcgttcataattccattgtggggacagccacgttcgatcagtactggagcgtgcgcacctctaagcggacttcaggaacagtgaccgtgaccgatcacttccgcgcctgggcgaaccggggcctgaacctcggcacaatagaccaaattacattgtgcgtggagggttaccaaagctctggatcagccaacatcacccagaacaccttctctcagggctcttcttccggcagttcgggtggctcatccggctccacaacgactactcgcatcgagtgtgagaacatgtccttgtccggaccctacgttagcaggatcaccaatccctttaatggtattgcgctgtacgccaacggagacacagcccgcgctaccgttaacttccccgcaagtcgcaactacaatttccgcctgcggggttgcggcaacaacaataatcttgcccgtgtggacctgaggatcgacggacggaccgtcgggaccttttattaccagggcacatacccctgggaggccccaattgacaatgtttatgtcagtgcggggagtcatacagtcgaaatcactgttactgcggataacggcacatgggacgtgtatgccgactacctggtgatacagtgactcgagggggggcccggtacccaattcgccctatagtgagtcgtattacaattcactggccgtcgttttacaacgtcgtgactgggaaaaccctggcgttacccaacttaatcgccttgcagcacatccccctttcgccagctggcgtaatagcgaagaggcccgcaccgatcgcccttcccaacagttgcgcagcctgaatggcgaatggaaattgtaagcgttaatattttgttaaaattcgcgttaaatttttgttaaatcagctcattttttaaccaataggccgaaatcggcaaaatcccttataaatcaaaagaatagaccgagatagggttgagtgttgttccagtttggaacaagagtccactattaaagaacgtggactccaacgtcaaagggcgaaaaaccgtctatcagggcgatggcccactacgtgaaccatcaccctaatcaagttttttggggtcgaggtgccgtaaagcactaaatcggaaccctaaagggagcccccgatttagagcttgacggggaaagccggcgaacgtggcgagaaaggaagggaagaaagcgaaaggagcgggcgctagggcgctggcaagtgtagcggtcacgctgcgcgtaaccaccacacccgccgcgcttaatgcgccgctacagggcgcgtcaggtg

SEQ ID NO: 3150 - DNA, 5099 bp, Artificial Sequence
  Synthetic Construct, AS-150 intein modified protein encoding nucleic acids in pBluescript
gcacttttcggggaaatgtgcgcggaacccctatttgtttatttttctaaatacattcaaatatgtatccgctcatgagacaataaccctgataaatgcttcaataatattgaaaaaggaagagtatgagtattcaacatttccgtgtcgcccttattcccttttttgcggcattttgccttcctgtttttgctcacccagaaacgctggtgaaagtaaaagatgctgaagatcagttgggtgcacgagtgggttacatcgaactggatctcaacagcggtaagatccttgagagttttcgccccgaagaacgttttccaatgatgagcacttttaaagttctgctatgtggcgcggtattatcccgtattgacgccgggcaagagcaactcggtcgccgcatacactattctcagaatgacttggttgagtactcaccagtcacagaaaagcatcttacggatggcatgacagtaagagaattatgcagtgctgccataaccatgagtgataacactgcggccaacttacttctgacaacgatcggaggaccgaaggagctaaccgcttttttgcacaacatgggggatcatgtaactcgccttgatcgttgggaaccggagctgaatgaagccataccaaacgacgagcgtgacaccacgatgcctgtagcaatggcaacaacgttgcgcaaactattaactggcgaactacttactctagcttcccggcaacaattaatagactggatggaggcggataaagttgcaggaccacttctgcgctcggcccttccggctggctggtttattgctgataaatctggagccggtgagcgtgggtctcgcggtatcattgcagcactggggccagatggtaagccctcccgtatcgtagttatctacacgacggggagtcaggcaactatggatgaacgaaatagacagatcgctgagataggtgcctcactgattaagcattggtaactgtcagaccaagtttactcatatatactttagattgatttaaaacttcatttttaatttaaaaggatctaggtgaagatcctttttgataatctcatgaccaaaatcccttaacgtgagttttcgttccactgagcgtcagaccccgtagaaaagatcaaaggatcttcttgagatcctttttttctgcgcgtaatctgctgcttgcaaacaaaaaaaccaccgctaccagcggtggtttgtttgccggatcaagagctaccaactctttttccgaaggtaactggcttcagcagagcgcagataccaaatactgtccttctagtgtagccgtagttaggccaccacttcaagaactctgtagcaccgcctacatacctcgctctgctaatcctgttaccagtggctgctgccagtggcgataagtcgtgtcttaccgggttggactcaagacgatagttaccggataaggcgcagcggtcgggctgaacggggggttcgtgcacacagcccagcttggagcgaacgacctacaccgaactgagatacctacagcgtgagctatgagaaagcgccacgcttcccgaagggagaaaggcggacaggtatccggtaagcggcagggtcggaacaggagagcgcacgagggagcttccagggggaaacgcctggtatctttatagtcctgtcgggtttcgccacctctgacttgagcgtcgatttttgtgatgctcgtcaggggggcggagcctatggaaaaacgccagcaacgcggcctttttacggttcctggccttttgctggccttttgctcacatgttctttcctgcgttatcccctgattctgtggataaccgtattaccgcctttgagtgagctgataccgctcgccgcagccgaacgaccgagcgcagcgagtcagtgagcgaggaagcggaagagcgcccaatacgcaaaccgcctctccccgcgcgttggccgattcattaatgcagctggcacgacaggtttcccgactggaaagcgggcagtgagcgcaacgcaattaatgtgagttagctcactcattaggcaccccaggctttacactttatgcttccggctcgtatgttgtgtggaattgtgagcggataacaatttcacacaggaaacagcatatgcaaacaagcattactctgacatccaacgcatccggtacgtttgacggttactattacgaactctggaaggatactggcaatacaacaatgacggtctacactcaaggtcgcttttcctgccagtggtcgaacatcaataacgcgttgtttaggaccgggaagaaatacaaccagaattggcagtctcttggcacaatccggatcacgtactctgcgacttacaacccaaacgggaactcctacttgtgtatctatggctggtctaccaacccattggtcgagttctacatcgttgagtcctgggggaactggagaccgcctggtgccacgtccctgggccaagtgacaatcgatggcgggacctacgacatctataggacgacacgcgtcaaccagccttgcctgcctgcgcgggctagggtcgtggattggtgcacagggcgggtcgttcgggtcggggagatcgttaggggggaggctaagggcgtctgggtggtctccctggacgaggctaggctgaggctcgttccaaggcctgttgtggctgctttcccaagcggcaaggctcaggtgtacgctctgaggaccgctacgggcagggtgctggaggcgacagctaaccacccagtctacactccagagggctggaggccactggggaccctcgctcctggcgactacgtcgctctgccaaggcatctctcgtacaggccatctctgcacctggagggccatgagctggatctcctggggttcgctctggctgagggccacctccgccatccatcgggcgtgtacctctacacctccagcgaggaggagctggctgccatggaggaggctctcagggcgttccctaatacgcggatccgcgtcgtttggaggaggggggttgctcacgtctacgtgggcagggtggacaggaggcaggaggctggcgctgtggcgttcctcaggaggatgggcctcctggggctggatgcgaagacgaagaggctcccagaggctgtcttcggcctgccaccagaggaggttgctaggttcctggggaggctctggacaggcgacggcggggtggatccaaagggcaggctgattcactacgctactgctagcaaggagctcgcttggggcgtccagcatctcctgctcaggctgggcctccagagcaggctggtggagaagcggttctcgggcgggtacaagggctacgctgtctacctgctcggcgggctggaggctgctaggaggttcgctgagacagtggggccatacctggtcggcaagcggaggcaggacctggaggctctgctcgcttcatgggagaaggctggcaggtccaccggggatgttctgccactcgcgttcctggaggaggtgagggctgctgttgctgaggtggctcagggccaggtggctgacctgctcagggaggccggcctcgcggaggggctgctctgcctgggcagggggaggagggggctctctcgcgccaccgtcggcaggctggctgccctcacggggtcactggcgctgctccggctcgcggaggctgaggtttactgggatcgcgtcgaggcggttgagccgctcggcgaggaggaggtcttcgatctcactgtggagggcactcatactttcgttgcggaggatgttatcgttcataattccattgtggggacagccacgttcgatcagtactggagcgtgcgcacctctaagcggacttcaggaacagtgaccgtgaccgatcacttccgcgcctgggcgaaccggggcctgaacctcggcacaatagaccaaattacattgtgcgtggagggttaccaaagctctggatcagccaacatcacccagaacaccttctctcagggctcttcttccggcagttcgggtggctcatccggctccacaacgactactcgcatcgagtgtgagaacatgtccttgtccggaccctacgttagcaggatcaccaatccctttaatggtattgcgctgtacgccaacggagacacagcccgcgctaccgttaacttccccgcaagtcgcaactacaatttccgcctgcggggttgcggcaacaacaataatcttgcccgtgtggacctgaggatcgacggacggaccgtcgggaccttttattaccagggcacatacccctgggaggccccaattgacaatgtttatgtcagtgcggggagtcatacagtcgaaatcactgttactgcggataacggcacatgggacgtgtatgccgactacctggtgatacagtgactcgagggggggcccggtacccaattcgccctatagtgagtcgtattacaattcactggccgtcgttttacaacgtcgtgactgggaaaaccctggcgttacccaacttaatcgccttgcagcacatccccctttcgccagctggcgtaatagcgaagaggcccgcaccgatcgcccttcccaacagttgcgcagcctgaatggcgaatggaaattgtaagcgttaatattttgttaaaattcgcgttaaatttttgttaaatcagctcattttttaaccaataggccgaaatcggcaaaatcccttataaatcaaaagaatagaccgagatagggttgagtgttgttccagtttggaacaagagtccactattaaagaacgtggactccaacgtcaaagggcgaaaaaccgtctatcagggcgatggcccactacgtgaaccatcaccctaatcaagttttttggggtcgaggtgccgtaaagcactaaatcggaaccctaaagggagcccccgatttagagcttgacggggaaagccggcgaacgtggcgagaaaggaagggaagaaagcgaaaggagcgggcgctagggcgctggcaagtgtagcggtcacgctgcgcgtaaccaccacacccgccgcgcttaatgcgccgctacagggcgcgtcaggtg

SEQ ID NO: 3151 - DNA, 5144 bp, Artificial Sequence
  Synthetic Construct, AS-151 intein modified protein encoding nucleic acids in pBluescript
gcacttttcggggaaatgtgcgcggaacccctatttgtttatttttctaaatacattcaaatatgtatccgctcatgagacaataaccctgataaatgcttcaataatattgaaaaaggaagagtatgagtattcaacatttccgtgtcgcccttattcccttttttgcggcattttgccttcctgtttttgctcacccagaaacgctggtgaaagtaaaagatgctgaagatcagttgggtgcacgagtgggttacatcgaactggatctcaacagcggtaagatccttgagagttttcgccccgaagaacgttttccaatgatgagcacttttaaagttctgctatgtggcgcggtattatcccgtattgacgccgggcaagagcaactcggtcgccgcatacactattctcagaatgacttggttgagtactcaccagtcacagaaaagcatcttacggatggcatgacagtaagagaattatgcagtgctgccataaccatgagtgataacactgcggccaacttacttctgacaacgatcggaggaccgaaggagctaaccgcttttttgcacaacatgggggatcatgtaactcgccttgatcgttgggaaccggagctgaatgaagccataccaaacgacgagcgtgacaccacgatgcctgtagcaatggcaacaacgttgcgcaaactattaactggcgaactacttactctagcttcccggcaacaattaatagactggatggaggcggataaagttgcaggaccacttctgcgctcggcccttccggctggctggtttattgctgataaatctggagccggtgagcgtgggtctcgcggtatcattgcagcactggggccagatggtaagccctcccgtatcgtagttatctacacgacggggagtcaggcaactatggatgaacgaaatagacagatcgctgagataggtgcctcactgattaagcattggtaactgtcagaccaagtttactcatatatactttagattgatttaaaacttcatttttaatttaaaaggatctaggtgaagatcctttttgataatctcatgaccaaaatcccttaacgtgagttttcgttccactgagcgtcagaccccgtagaaaagatcaaaggatcttcttgagatcctttttttctgcgcgtaatctgctgcttgcaaacaaaaaaaccaccgctaccagcggtggtttgtttgccggatcaagagctaccaactctttttccgaaggtaactggcttcagcagagcgcagataccaaatactgtccttctagtgtagccgtagttaggccaccacttcaagaactctgtagcaccgcctacatacctcgctctgctaatcctgttaccagtggctgctgccagtggcgataagtcgtgtcttaccgggttggactcaagacgatagttaccggataaggcgcagcggtcgggctgaacggggggttcgtgcacacagcccagcttggagcgaacgacctacaccgaactgagatacctacagcgtgagctatgagaaagcgccacgcttcccgaagggagaaaggcggacaggtatccggtaagcggcagggtcggaacaggagagcgcacgagggagcttccagggggaaacgcctggtatctttatagtcctgtcgggtttcgccacctctgacttgagcgtcgatttttgtgatgctcgtcaggggggcggagcctatggaaaaacgccagcaacgcggcctttttacggttcctggccttttgctggccttttgctcacatgttctttcctgcgttatcccctgattctgtggataaccgtattaccgcctttgagtgagctgataccgctcgccgcagccgaacgaccgagcgcagcgagtcagtgagcgaggaagcggaagagcgcccaatacgcaaaccgcctctccccgcgcgttggccgattcattaatgcagctggcacgacaggtttcccgactggaaagcgggcagtgagcgcaacgcaattaatgtgagttagctcactcattaggcaccccaggctttacactttatgcttccggctcgtatgttgtgtggaattgtgagcggataacaatttcacacaggaaacagcatatgcaaacaagcattactctgacatccaacgcatccggtacgtttgacggttactattacgaactctggaaggatactggcaatacaacaatgacggtctacactcaaggtcgcttttcctgccagtggtcgaacatcaataacgcgttgtttaggaccgggaagaaatacaaccagaattggcagtctcttggcacaatccggatcacgtactctgcgacttacaacccaaacgggaactcctacttgtgtatctatggctggtctaccaacccattggtcgagttctacatcgttgagtcctgggggaactggagaccgcctggtgccacgtccctgggccaagtgacaatcgatggcgggacctacgacatctataggacgacacgcgtcaaccagccttgcctgcatccggacactctcgttcataccgatcgggggactctcaggctgcgggagctcgtggaccctttcaggcggggctggcagccgcacaccctgagcgttgctacggacgagggctggaggccatcgccagagggctacaacaatggggtggctccaaccctcagggtggtcctggagaacggcctggaggttcaggggacactcaatcataagctcaaggtgctgcgcgaggatggcactagggagtgggtcgagctccaggacctgaggccaggcgattgggtcatctgggttctggacgagcacaccggcacgccagtccagctcgctccactggatgagccactccatcctaacaccacgccaattcgcacacctgaggtgctgactgaggacctcgccttcctcctgggcttcttcttcggcgaggggttcgtgtcgggcgataggatcgggttctctgtccacgaggaggagccaatgcgggaggaggcgaagaggctgttccgggagctcttcggcctggagctgagggaggagaggaagccaggggaccgctcagttaccctggttgtgcggtcccgccctctggtgacgtggctccgcaagaacggcctcctgaaggggaaggcgagggagctggaggtcccgcgggctatcaggcagtccccaaggcctgttctcgctgcgttcctcaggggcctgttcgaggccgacggcacaattactgcggggtacccaatgctgacaactgcgagcaagcgcctcgctcaggatgtgatggtcctcctgggcgggctgggcattccttctaagctcctgaggtacaatccactcccaggccgcttctcaaaggctgagcattacggcgtccgggtcgttacggctaaggggctggagaggtacctggagcggatcggcgtgccaaaggggtcgcgcctggaggcgctgcacggcattaagccagacgtccgcagggagtccagctggccactgcctcatgctgagggcctcctgaagccactcctgaccgtgacggagaagggcaggaaggggtacgctagcccatacacaccactgcgcaaggacctcctgaggtacctgaggggcgagaggcagctcacagctactgggtacgccatggtcctggagaaggctcaggatctcggcctggaggctgagccattccccttcaacgagtactacgttagggtggcctccgtggagccgggcggggagatcctcacgctggatctctctgtggagggcaatcatacatacctcgccaatgggctcgtctctcataattccattgtggggacagccacgttcgatcagtactggagcgtgcgcacctctaagcggacttcaggaacagtgaccgtgaccgatcacttccgcgcctgggcgaaccggggcctgaacctcggcacaatagaccaaattacattgtgcgtggagggttaccaaagctctggatcagccaacatcacccagaacaccttctctcagggctcttcttccggcagttcgggtggctcatccggctccacaacgactactcgcatcgagtgtgagaacatgtccttgtccggaccctacgttagcaggatcaccaatccctttaatggtattgcgctgtacgccaacggagacacagcccgcgctaccgttaacttccccgcaagtcgcaactacaatttccgcctgcggggttgcggcaacaacaataatcttgcccgtgtggacctgaggatcgacggacggaccgtcgggaccttttattaccagggcacatacccctgggaggccccaattgacaatgtttatgtcagtgcggggagtcatacagtcgaaatcactgttactgcggataacggcacatgggacgtgtatgccgactacctggtgatacagtgactcgagggggggcccggtacccaattcgccctatagtgagtcgtattacaattcactggccgtcgttttacaacgtcgtgactgggaaaaccctggcgttacccaacttaatcgccttgcagcacatccccctttcgccagctggcgtaatagcgaagaggcccgcaccgatcgcccttcccaacagttgcgcagcctgaatggcgaatggaaattgtaagcgttaatattttgttaaaattcgcgttaaatttttgttaaatcagctcattttttaaccaataggccgaaatcggcaaaatcccttataaatcaaaagaatagaccgagatagggttgagtgttgttccagtttggaacaagagtccactattaaagaacgtggactccaacgtcaaagggcgaaaaaccgtctatcagggcgatggcccactacgtgaaccatcaccctaatcaagttttttggggtcgaggtgccgtaaagcactaaatcggaaccctaaagggagcccccgatttagagcttgacggggaaagccggcgaacgtggcgagaaaggaagggaagaaagcgaaaggagcgggcgctagggcgctggcaagtgtagcggtcacgctgcgcgtaaccaccacacccgccgcgcttaatgcgccgctacagggcgcgtcaggtg

SEQ ID NO: 3152 - DNA, 5051 bp, Artificial Sequence
  Synthetic Construct, AS-152 intein modified protein encoding nucleic acids in pBluescript
gcacttttcggggaaatgtgcgcggaacccctatttgtttatttttctaaatacattcaaatatgtatccgctcatgagacaataaccctgataaatgcttcaataatattgaaaaaggaagagtatgagtattcaacatttccgtgtcgcccttattcccttttttgcggcattttgccttcctgtttttgctcacccagaaacgctggtgaaagtaaaagatgctgaagatcagttgggtgcacgagtgggttacatcgaactggatctcaacagcggtaagatccttgagagttttcgccccgaagaacgttttccaatgatgagcacttttaaagttctgctatgtggcgcggtattatcccgtattgacgccgggcaagagcaactcggtcgccgcatacactattctcagaatgacttggttgagtactcaccagtcacagaaaagcatcttacggatggcatgacagtaagagaattatgcagtgctgccataaccatgagtgataacactgcggccaacttacttctgacaacgatcggaggaccgaaggagctaaccgcttttttgcacaacatgggggatcatgtaactcgccttgatcgttgggaaccggagctgaatgaagccataccaaacgacgagcgtgacaccacgatgcctgtagcaatggcaacaacgttgcgcaaactattaactggcgaactacttactctagcttcccggcaacaattaatagactggatggaggcggataaagttgcaggaccacttctgcgctcggcccttccggctggctggtttattgctgataaatctggagccggtgagcgtgggtctcgcggtatcattgcagcactggggccagatggtaagccctcccgtatcgtagttatctacacgacggggagtcaggcaactatggatgaacgaaatagacagatcgctgagataggtgcctcactgattaagcattggtaactgtcagaccaagtttactcatatatactttagattgatttaaaacttcatttttaatttaaaaggatctaggtgaagatcctttttgataatctcatgaccaaaatcccttaacgtgagttttcgttccactgagcgtcagaccccgtagaaaagatcaaaggatcttcttgagatcctttttttctgcgcgtaatctgctgcttgcaaacaaaaaaaccaccgctaccagcggtggtttgtttgccggatcaagagctaccaactctttttccgaaggtaactggcttcagcagagcgcagataccaaatactgtccttctagtgtagccgtagttaggccaccacttcaagaactctgtagcaccgcctacatacctcgctctgctaatcctgttaccagtggctgctgccagtggcgataagtcgtgtcttaccgggttggactcaagacgatagttaccggataaggcgcagcggtcgggctgaacggggggttcgtgcacacagcccagcttggagcgaacgacctacaccgaactgagatacctacagcgtgagctatgagaaagcgccacgcttcccgaagggagaaaggcggacaggtatccggtaagcggcagggtcggaacaggagagcgcacgagggagcttccagggggaaacgcctggtatctttatagtcctgtcgggtttcgccacctctgacttgagcgtcgatttttgtgatgctcgtcaggggggcggagcctatggaaaaacgccagcaacgcggcctttttacggttcctggccttttgctggccttttgctcacatgttctttcctgcgttatcccctgattctgtggataaccgtattaccgcctttgagtgagctgataccgctcgccgcagccgaacgaccgagcgcagcgagtcagtgagcgaggaagcggaagagcgcccaatacgcaaaccgcctctccccgcgcgttggccgattcattaatgcagctggcacgacaggtttcccgactggaaagcgggcagtgagcgcaacgcaattaatgtgagttagctcactcattaggcaccccaggctttacactttatgcttccggctcgtatgttgtgtggaattgtgagcggataacaatttcacacaggaaacagcatatgcaaacaagcattactctgacatccaacgcatccggtacgtttgacggttactattacgaactctggaaggatactggcaatacaacaatgacggtctacactcaaggtcgcttttcctgccagtggtcgaacatcaataacgcgttgtttaggaccgggaagaaatacaaccagaattggcagtctcttggcacaatccggatcacgtactctgcgacttacaacccaaacgggaactcctacttgtgtatctatggctggtctaccaacccattggtcgagttctacatcgttgagtcctgggggaactggagaccgcctggtgccacgtccctgggccaagtgacaatcgatggcgggacctacgacatctataggacgacacgcgtcaaccagccttgcttcgtggggtctactcgcattccgacggagcgggggctggttcctattgaggagctcgctagggagggggggtctttctacctggtgactgacaacagggctccgttcggcgggaggggcgctccactcccaggccacgggaccgccgtcaggaaggccgttcgggcgttcttcacgggcgtcaagccagtggtccggctgaggacaagggagggcctggaggttaccctcacgccagatcatctcctgctcacgccagagggctacagggaggctgggaagctgaggccaggcgagaagatcctcgtccagtccggcgaggggctgttcccaaaggaggagagcctgcctgctcaggctctcgctgttgtgcacgagagggtggcgacggctggcgggaggggcgggaggggcagggctgacgtccgcgcccagtacaggaacctccccacacgctggtcaagggagctgggcgttgctctcgggtggctgctcggcgacgggtacctgagggaggatggcgtcgggttctacttctcccggaaggacttcgctgatctggcctggctcccagacctgctccgcgattggttcggccctgggacactccaggagactcgcagcaacaccttccacctgcatttcaataggatcccggctgagttcttccaggctctcggcgtgaaggctgcgcgggcaactgagaagagggtcccagagtcgctgttccgggctcctcgcgaggctgtcgttggcttcctgcaggggctcttctctgcggacggctcagttcagattaacgagaataagcaggatgctaccgtgaggctggcctccagctcgctcgctctgctccaggacgtgcagctgctcctgctcaacctgggcatcctcgggaagattcacaagaggagggaggctgctaggaaggctctcccggacggcaagggcgggctgagggagtacccagtcgctcctcagtacgagctgattctcggcggggagaatagggatcggttcgccgaggtggtcggcttcctccaggaggagaagcagagcaagctgctcgcgttcctgaggcataggccgaggggctcgtacaggaagcccttcctcgctaccgttgcttctgtggagccagctggcgaggcgcccgtgtacgatctcacagagccagttacacactcgctcattgctaatgggctcgttgctcataattccattgtggggacagccacgttcgatcagtactggagcgtgcgcacctctaagcggacttcaggaacagtgaccgtgaccgatcacttccgcgcctgggcgaaccggggcctgaacctcggcacaatagaccaaattacattgtgcgtggagggttaccaaagctctggatcagccaacatcacccagaacaccttctctcagggctcttcttccggcagttcgggtggctcatccggctccacaacgactactcgcatcgagtgtgagaacatgtccttgtccggaccctacgttagcaggatcaccaatccctttaatggtattgcgctgtacgccaacggagacacagcccgcgctaccgttaacttccccgcaagtcgcaactacaatttccgcctgcggggttgcggcaacaacaataatcttgcccgtgtggacctgaggatcgacggacggaccgtcgggaccttttattaccagggcacatacccctgggaggccccaattgacaatgtttatgtcagtgcggggagtcatacagtcgaaatcactgttactgcggataacggcacatgggacgtgtatgccgactacctggtgatacagtgactcgagggggggcccggtacccaattcgccctatagtgagtcgtattacaattcactggccgtcgttttacaacgtcgtgactgggaaaaccctggcgttacccaacttaatcgccttgcagcacatccccctttcgccagctggcgtaatagcgaagaggcccgcaccgatcgcccttcccaacagttgcgcagcctgaatggcgaatggaaattgtaagcgttaatattttgttaaaattcgcgttaaatttttgttaaatcagctcattttttaaccaataggccgaaatcggcaaaatcccttataaatcaaaagaatagaccgagatagggttgagtgttgttccagtttggaacaagagtccactattaaagaacgtggactccaacgtcaaagggcgaaaaaccgtctatcagggcgatggcccactacgtgaaccatcaccctaatcaagttttttggggtcgaggtgccgtaaagcactaaatcggaaccctaaagggagcccccgatttagagcttgacggggaaagccggcgaacgtggcgagaaaggaagggaagaaagcgaaaggagcgggcgctagggcgctggcaagtgtagcggtcacgctgcgcgtaaccaccacacccgccgcgcttaatgcgccgctacagggcgcgtcaggtg

SEQ ID NO: 3153 - DNA, 4388 bp, Artificial Sequence
  Synthetic Construct, AS-153 intein modified protein encoding nucleic acids in pBluescript
gcacttttcggggaaatgtgcgcggaacccctatttgtttatttttctaaatacattcaaatatgtatccgctcatgagacaataaccctgataaatgcttcaataatattgaaaaaggaagagtatgagtattcaacatttccgtgtcgcccttattcccttttttgcggcattttgccttcctgtttttgctcacccagaaacgctggtgaaagtaaaagatgctgaagatcagttgggtgcacgagtgggttacatcgaactggatctcaacagcggtaagatccttgagagttttcgccccgaagaacgttttccaatgatgagcacttttaaagttctgctatgtggcgcggtattatcccgtattgacgccgggcaagagcaactcggtcgccgcatacactattctcagaatgacttggttgagtactcaccagtcacagaaaagcatcttacggatggcatgacagtaagagaattatgcagtgctgccataaccatgagtgataacactgcggccaacttacttctgacaacgatcggaggaccgaaggagctaaccgcttttttgcacaacatgggggatcatgtaactcgccttgatcgttgggaaccggagctgaatgaagccataccaaacgacgagcgtgacaccacgatgcctgtagcaatggcaacaacgttgcgcaaactattaactggcgaactacttactctagcttcccggcaacaattaatagactggatggaggcggataaagttgcaggaccacttctgcgctcggcccttccggctggctggtttattgctgataaatctggagccggtgagcgtgggtctcgcggtatcattgcagcactggggccagatggtaagccctcccgtatcgtagttatctacacgacggggagtcaggcaactatggatgaacgaaatagacagatcgctgagataggtgcctcactgattaagcattggtaactgtcagaccaagtttactcatatatactttagattgatttaaaacttcatttttaatttaaaaggatctaggtgaagatcctttttgataatctcatgaccaaaatcccttaacgtgagttttcgttccactgagcgtcagaccccgtagaaaagatcaaaggatcttcttgagatcctttttttctgcgcgtaatctgctgcttgcaaacaaaaaaaccaccgctaccagcggtggtttgtttgccggatcaagagctaccaactctttttccgaaggtaactggcttcagcagagcgcagataccaaatactgtccttctagtgtagccgtagttaggccaccacttcaagaactctgtagcaccgcctacatacctcgctctgctaatcctgttaccagtggctgctgccagtggcgataagtcgtgtcttaccgggttggactcaagacgatagttaccggataaggcgcagcggtcgggctgaacggggggttcgtgcacacagcccagcttggagcgaacgacctacaccgaactgagatacctacagcgtgagctatgagaaagcgccacgcttcccgaagggagaaaggcggacaggtatccggtaagcggcagggtcggaacaggagagcgcacgagggagcttccagggggaaacgcctggtatctttatagtcctgtcgggtttcgccacctctgacttgagcgtcgatttttgtgatgctcgtcaggggggcggagcctatggaaaaacgccagcaacgcggcctttttacggttcctggccttttgctggccttttgctcacatgttctttcctgcgttatcccctgattctgtggataaccgtattaccgcctttgagtgagctgataccgctcgccgcagccgaacgaccgagcgcagcgagtcagtgagcgaggaagcggaagagcgcccaatacgcaaaccgcctctccccgcgcgttggccgattcattaatgcagctggcacgacaggtttcccgactggaaagcgggcagtgagcgcaacgcaattaatgtgagttagctcactcattaggcaccccaggctttacactttatgcttccggctcgtatgttgtgtggaattgtgagcggataacaatttcacacaggaaacagcatatgcaaacaagcattactctgacatccaacgcatccggtacgtttgacggttactattacgaactctggaaggatactggcaatacaacaatgacggtctacactcaaggtcgcttttcctgccagtggtcgaacatcaataacgcgttgtttaggaccgggaagaaatacaaccagaattggcagtctcttggcacaatccggatcacgtactctgcgacttacaacccaaacgggaactcctacttgtgtatctatggctggtctaccaacccattggtcgagttctacatcgttgagtcctgggggaactggagaccgcctggtgccacgtccctgggccaagtgacaatcgatggcgggacctacgacatctataggacgacacgcgtcaaccagccttgcgtttcgggggagacgccagtctacctcgctgacggcaagacaattaagatcaaggacctctactcatctgagcgcaagaaggaggacaacatcgtcgaggctggctccggggaggagatcattcacctcaaggacccgatccagatctacagctacgttgatggcacgatcgtgcgctcccgctcccgcctcctgtacaaggggaagtccagctacctggtgcgcatcgagacaattggcgggcgctcagtgtccgtcactcccgtccataagctcttcgttctgaccgagaagggcatcgaggaggttatggcctcgaatctcaaagtgggggacatgattgctgctgtcgctgagagcgagtcggaggcccgggattgcggcatgagcgaggagtgcgtgatggaggcggaggtctacacctctctggaggctacgttcgaccgcgttaagtcaatcgcgtacgagaagggcgacttcgatgtgtacgatctgtcagttccagagtacggcaggaacttcattgggggggaggggctgctcgtgctccacaactccattgtggggacagccacgttcgatcagtactggagcgtgcgcacctctaagcggacttcaggaacagtgaccgtgaccgatcacttccgcgcctgggcgaaccggggcctgaacctcggcacaatagaccaaattacattgtgcgtggagggttaccaaagctctggatcagccaacatcacccagaacaccttctctcagggctcttcttccggcagttcgggtggctcatccggctccacaacgactactcgcatcgagtgtgagaacatgtccttgtccggaccctacgttagcaggatcaccaatccctttaatggtattgcgctgtacgccaacggagacacagcccgcgctaccgttaacttccccgcaagtcgcaactacaatttccgcctgcggggttgcggcaacaacaataatcttgcccgtgtggacctgaggatcgacggacggaccgtcgggaccttttattaccagggcacatacccctgggaggccccaattgacaatgtttatgtcagtgcggggagtcatacagtcgaaatcactgttactgcggataacggcacatgggacgtgtatgccgactacctggtgatacagtgactcgagggggggcccggtacccaattcgccctatagtgagtcgtattacaattcactggccgtcgttttacaacgtcgtgactgggaaaaccctggcgttacccaacttaatcgccttgcagcacatccccctttcgccagctggcgtaatagcgaagaggcccgcaccgatcgcccttcccaacagttgcgcagcctgaatggcgaatggaaattgtaagcgttaatattttgttaaaattcgcgttaaatttttgttaaatcagctcattttttaaccaataggccgaaatcggcaaaatcccttataaatcaaaagaatagaccgagatagggttgagtgttgttccagtttggaacaagagtccactattaaagaacgtggactccaacgtcaaagggcgaaaaaccgtctatcagggcgatggcccactacgtgaaccatcaccctaatcaagttttttggggtcgaggtgccgtaaagcactaaatcggaaccctaaagggagcccccgatttagagcttgacggggaaagccggcgaacgtggcgagaaaggaagggaagaaagcgaaaggagcgggcgctagggcgctggcaagtgtagcggtcacgctgcgcgtaaccaccacacccgccgcgcttaatgcgccgctacagggcgcgtcaggtg

SEQ ID NO: 3154 - DNA, 4286 bp, Artificial Sequence
  Synthetic Construct, AS-154 intein modified protein encoding nucleic acids in pBluescript
gcacttttcggggaaatgtgcgcggaacccctatttgtttatttttctaaatacattcaaatatgtatccgctcatgagacaataaccctgataaatgcttcaataatattgaaaaaggaagagtatgagtattcaacatttccgtgtcgcccttattcccttttttgcggcattttgccttcctgtttttgctcacccagaaacgctggtgaaagtaaaagatgctgaagatcagttgggtgcacgagtgggttacatcgaactggatctcaacagcggtaagatccttgagagttttcgccccgaagaacgttttccaatgatgagcacttttaaagttctgctatgtggcgcggtattatcccgtattgacgccgggcaagagcaactcggtcgccgcatacactattctcagaatgacttggttgagtactcaccagtcacagaaaagcatcttacggatggcatgacagtaagagaattatgcagtgctgccataaccatgagtgataacactgcggccaacttacttctgacaacgatcggaggaccgaaggagctaaccgcttttttgcacaacatgggggatcatgtaactcgccttgatcgttgggaaccggagctgaatgaagccataccaaacgacgagcgtgacaccacgatgcctgtagcaatggcaacaacgttgcgcaaactattaactggcgaactacttactctagcttcccggcaacaattaatagactggatggaggcggataaagttgcaggaccacttctgcgctcggcccttccggctggctggtttattgctgataaatctggagccggtgagcgtgggtctcgcggtatcattgcagcactggggccagatggtaagccctcccgtatcgtagttatctacacgacggggagtcaggcaactatggatgaacgaaatagacagatcgctgagataggtgcctcactgattaagcattggtaactgtcagaccaagtttactcatatatactttagattgatttaaaacttcatttttaatttaaaaggatctaggtgaagatcctttttgataatctcatgaccaaaatcccttaacgtgagttttcgttccactgagcgtcagaccccgtagaaaagatcaaaggatcttcttgagatcctttttttctgcgcgtaatctgctgcttgcaaacaaaaaaaccaccgctaccagcggtggtttgtttgccggatcaagagctaccaactctttttccgaaggtaactggcttcagcagagcgcagataccaaatactgtccttctagtgtagccgtagttaggccaccacttcaagaactctgtagcaccgcctacatacctcgctctgctaatcctgttaccagtggctgctgccagtggcgataagtcgtgtcttaccgggttggactcaagacgatagttaccggataaggcgcagcggtcgggctgaacggggggttcgtgcacacagcccagcttggagcgaacgacctacaccgaactgagatacctacagcgtgagctatgagaaagcgccacgcttcccgaagggagaaaggcggacaggtatccggtaagcggcagggtcggaacaggagagcgcacgagggagcttccagggggaaacgcctggtatctttatagtcctgtcgggtttcgccacctctgacttgagcgtcgatttttgtgatgctcgtcaggggggcggagcctatggaaaaacgccagcaacgcggcctttttacggttcctggccttttgctggccttttgctcacatgttctttcctgcgttatcccctgattctgtggataaccgtattaccgcctttgagtgagctgataccgctcgccgcagccgaacgaccgagcgcagcgagtcagtgagcgaggaagcggaagagcgcccaatacgcaaaccgcctctccccgcgcgttggccgattcattaatgcagctggcacgacaggtttcccgactggaaagcgggcagtgagcgcaacgcaattaatgtgagttagctcactcattaggcaccccaggctttacactttatgcttccggctcgtatgttgtgtggaattgtgagcggataacaatttcacacaggaaacagcatatgcaaacaagcattactctgacatccaacgcatccggtacgtttgacggttactattacgaactctggaaggatactggcaatacaacaatgacggtctacactcaaggtcgcttttcctgccagtggtcgaacatcaataacgcgttgtttaggaccgggaagaaatacaaccagaattggcagtctcttggcacaatccggatcacgtactctgcgacttacaacccaaacgggaactcctacttgtgtatctatggctggtctaccaacccattggtcgagttctacatcgttgagtcctgggggaactggagaccgcctggtgccacgtccctgggccaagtgacaatcgatggcgggacctacgacatctataggacgacacgcgtcaaccagccttgcctctcaggggagactgcggttatgacggtggagtacggggctattcctattcggcggctggttcaggagcggctgatctgccaggtttactcgctcgacccacagggccacctgtacacgcagcctatcgctcagtggcatttccagggcttccgcccggtgtacgcgtaccagctggaggacgggtccacaatttgcgctactccggatcaccggttcatgaccacgagcggccagatgctgcccatcgagcagattttccgcgaggggctggagctgtggcaggtggccatcgctccaccaggcgctctcgctcaggggctgaagccggccgtccagatgtcctgcatgaagattgtgggcaggaggctcgtcgggtggcaggctgtttacgatattgggctcgccggggatcataacttcctcctcgctaatggggctattgctgctaattccattgtggggacagccacgttcgatcagtactggagcgtgcgcacctctaagcggacttcaggaacagtgaccgtgaccgatcacttccgcgcctgggcgaaccggggcctgaacctcggcacaatagaccaaattacattgtgcgtggagggttaccaaagctctggatcagccaacatcacccagaacaccttctctcagggctcttcttccggcagttcgggtggctcatccggctccacaacgactactcgcatcgagtgtgagaacatgtccttgtccggaccctacgttagcaggatcaccaatccctttaatggtattgcgctgtacgccaacggagacacagcccgcgctaccgttaacttccccgcaagtcgcaactacaatttccgcctgcggggttgcggcaacaacaataatcttgcccgtgtggacctgaggatcgacggacggaccgtcgggaccttttattaccagggcacatacccctgggaggccccaattgacaatgtttatgtcagtgcggggagtcatacagtcgaaatcactgttactgcggataacggcacatgggacgtgtatgccgactacctggtgatacagtgactcgagggggggcccggtacccaattcgccctatagtgagtcgtattacaattcactggccgtcgttttacaacgtcgtgactgggaaaaccctggcgttacccaacttaatcgccttgcagcacatccccctttcgccagctggcgtaatagcgaagaggcccgcaccgatcgcccttcccaacagttgcgcagcctgaatggcgaatggaaattgtaagcgttaatattttgttaaaattcgcgttaaatttttgttaaatcagctcattttttaaccaataggccgaaatcggcaaaatcccttataaatcaaaagaatagaccgagatagggttgagtgttgttccagtttggaacaagagtccactattaaagaacgtggactccaacgtcaaagggcgaaaaaccgtctatcagggcgatggcccactacgtgaaccatcaccctaatcaagttttttggggtcgaggtgccgtaaagcactaaatcggaaccctaaagggagcccccgatttagagcttgacggggaaagccggcgaacgtggcgagaaaggaagggaagaaagcgaaaggagcgggcgctagggcgctggcaagtgtagcggtcacgctgcgcgtaaccaccacacccgccgcgcttaatgcgccgctacagggcgcgtcaggtg

SEQ ID NO: 3155 - DNA, 4751 bp, Artificial Sequence
  Synthetic Construct, AS-155 intein modified protein encoding nucleic acids in pBluescript
gcacttttcggggaaatgtgcgcggaacccctatttgtttatttttctaaatacattcaaatatgtatccgctcatgagacaataaccctgataaatgcttcaataatattgaaaaaggaagagtatgagtattcaacatttccgtgtcgcccttattcccttttttgcggcattttgccttcctgtttttgctcacccagaaacgctggtgaaagtaaaagatgctgaagatcagttgggtgcacgagtgggttacatcgaactggatctcaacagcggtaagatccttgagagttttcgccccgaagaacgttttccaatgatgagcacttttaaagttctgctatgtggcgcggtattatcccgtattgacgccgggcaagagcaactcggtcgccgcatacactattctcagaatgacttggttgagtactcaccagtcacagaaaagcatcttacggatggcatgacagtaagagaattatgcagtgctgccataaccatgagtgataacactgcggccaacttacttctgacaacgatcggaggaccgaaggagctaaccgcttttttgcacaacatgggggatcatgtaactcgccttgatcgttgggaaccggagctgaatgaagccataccaaacgacgagcgtgacaccacgatgcctgtagcaatggcaacaacgttgcgcaaactattaactggcgaactacttactctagcttcccggcaacaattaatagactggatggaggcggataaagttgcaggaccacttctgcgctcggcccttccggctggctggtttattgctgataaatctggagccggtgagcgtgggtctcgcggtatcattgcagcactggggccagatggtaagccctcccgtatcgtagttatctacacgacggggagtcaggcaactatggatgaacgaaatagacagatcgctgagataggtgcctcactgattaagcattggtaactgtcagaccaagtttactcatatatactttagattgatttaaaacttcatttttaatttaaaaggatctaggtgaagatcctttttgataatctcatgaccaaaatcccttaacgtgagttttcgttccactgagcgtcagaccccgtagaaaagatcaaaggatcttcttgagatcctttttttctgcgcgtaatctgctgcttgcaaacaaaaaaaccaccgctaccagcggtggtttgtttgccggatcaagagctaccaactctttttccgaaggtaactggcttcagcagagcgcagataccaaatactgtccttctagtgtagccgtagttaggccaccacttcaagaactctgtagcaccgcctacatacctcgctctgctaatcctgttaccagtggctgctgccagtggcgataagtcgtgtcttaccgggttggactcaagacgatagttaccggataaggcgcagcggtcgggctgaacggggggttcgtgcacacagcccagcttggagcgaacgacctacaccgaactgagatacctacagcgtgagctatgagaaagcgccacgcttcccgaagggagaaaggcggacaggtatccggtaagcggcagggtcggaacaggagagcgcacgagggagcttccagggggaaacgcctggtatctttatagtcctgtcgggtttcgccacctctgacttgagcgtcgatttttgtgatgctcgtcaggggggcggagcctatggaaaaacgccagcaacgcggcctttttacggttcctggccttttgctggccttttgctcacatgttctttcctgcgttatcccctgattctgtggataaccgtattaccgcctttgagtgagctgataccgctcgccgcagccgaacgaccgagcgcagcgagtcagtgagcgaggaagcggaagagcgcccaatacgcaaaccgcctctccccgcgcgttggccgattcattaatgcagctggcacgacaggtttcccgactggaaagcgggcagtgagcgcaacgcaattaatgtgagttagctcactcattaggcaccccaggctttacactttatgcttccggctcgtatgttgtgtggaattgtgagcggataacaatttcacacaggaaacagcatatgcaaacaagcattactctgacatccaacgcatccggtacgtttgacggttactattacgaactctggaaggatactggcaatacaacaatgacggtctacactcaaggtcgcttttcctgccagtggtcgaacatcaataacgcgttgtttaggaccgggaagaaatacaaccagaattggcagtctcttggcacaatccggatcacgtactctgcgacttacaacccaaacgggaactcctacttgtgtatctatggctggtctaccaacccattggtcgagttctacatcgttgagtcctgggggaactggagaccgcctggtgccacgtccctgggccaagtgacaatcgatggcgggacctacgacatctataggacgacacgcgtcaaccagccttgcgttaccgctgacacatgggttactaccgctgaggggccaaggcaggtggaggagctgatcggcaagaagttcacggctatcgttaacggcgaggagtgggagtccagcgaggaggggttcttcgagacagacgttaagccagtgtacaccctgaagacggctgagggcttcgagctgaggctcacggctgatcaccctgtcatgaaggttgagaggatgacacggtacaaggtggagactcagtggtccaacgctggcgacctcaagccaggggataagatcattatcaacaatcatagggacttcggcaattggagcgtcaaggggaagtacaccgagggcgaggggtacctgattggcctcctgctcggcgacgggacgatcaagaagctcaacccctggatgaaggcgatttcaaagaagatggagaaggcctccgcggatttctgcgagggcatcctgagggggctcttcgacgctgatggctctgtgcaggggaatcagtcgaagggcgtctctattcgcctggcccagtcagacgtcgagatcctcaaggcggttcagcgcattctgctcaggttcggcatcttctcgaaggtgtacatgaaccgcaggggcgagcggaaggttaagatgccggatgggaagggcggggtcaaggagtacatcaccaagccccagcacgagctcgtgatcagcaacgacaatatcctctacttcgctgagagggtcggcttctcggatgccgagaagatggagaagctggagaaggctatctggaactacaagcggaagatgaatagggagaggttcgtggctagcgtcgaggaggtggtcccagacggcgttgagaaggtgtacgacgttaagattccaggcatcaatgctttcaatgctaatggcttcgtggttcacaactccattgtggggacagccacgttcgatcagtactggagcgtgcgcacctctaagcggacttcaggaacagtgaccgtgaccgatcacttccgcgcctgggcgaaccggggcctgaacctcggcacaatagaccaaattacattgtgcgtggagggttaccaaagctctggatcagccaacatcacccagaacaccttctctcagggctcttcttccggcagttcgggtggctcatccggctccacaacgactactcgcatcgagtgtgagaacatgtccttgtccggaccctacgttagcaggatcaccaatccctttaatggtattgcgctgtacgccaacggagacacagcccgcgctaccgttaacttccccgcaagtcgcaactacaatttccgcctgcggggttgcggcaacaacaataatcttgcccgtgtggacctgaggatcgacggacggaccgtcgggaccttttattaccagggcacatacccctgggaggccccaattgacaatgtttatgtcagtgcggggagtcatacagtcgaaatcactgttactgcggataacggcacatgggacgtgtatgccgactacctggtgatacagtgactcgagggggggcccggtacccaattcgccctatagtgagtcgtattacaattcactggccgtcgttttacaacgtcgtgactgggaaaaccctggcgttacccaacttaatcgccttgcagcacatccccctttcgccagctggcgtaatagcgaagaggcccgcaccgatcgcccttcccaacagttgcgcagcctgaatggcgaatggaaattgtaagcgttaatattttgttaaaattcgcgttaaatttttgttaaatcagctcattttttaaccaataggccgaaatcggcaaaatcccttataaatcaaaagaatagaccgagatagggttgagtgttgttccagtttggaacaagagtccactattaaagaacgtggactccaacgtcaaagggcgaaaaaccgtctatcagggcgatggcccactacgtgaaccatcaccctaatcaagttttttggggtcgaggtgccgtaaagcactaaatcggaaccctaaagggagcccccgatttagagcttgacggggaaagccggcgaacgtggcgagaaaggaagggaagaaagcgaaaggagcgggcgctagggcgctggcaagtgtagcggtcacgctgcgcgtaaccaccacacccgccgcgcttaatgcgccgctacagggcgcgtcaggtg

SEQ ID NO: 3156 - DNA, 5198 bp, Artificial Sequence
  Synthetic Construct, AS-156 intein modified protein encoding nucleic acids in pBluescript
gcacttttcggggaaatgtgcgcggaacccctatttgtttatttttctaaatacattcaaatatgtatccgctcatgagacaataaccctgataaatgcttcaataatattgaaaaaggaagagtatgagtattcaacatttccgtgtcgcccttattcccttttttgcggcattttgccttcctgtttttgctcacccagaaacgctggtgaaagtaaaagatgctgaagatcagttgggtgcacgagtgggttacatcgaactggatctcaacagcggtaagatccttgagagttttcgccccgaagaacgttttccaatgatgagcacttttaaagttctgctatgtggcgcggtattatcccgtattgacgccgggcaagagcaactcggtcgccgcatacactattctcagaatgacttggttgagtactcaccagtcacagaaaagcatcttacggatggcatgacagtaagagaattatgcagtgctgccataaccatgagtgataacactgcggccaacttacttctgacaacgatcggaggaccgaaggagctaaccgcttttttgcacaacatgggggatcatgtaactcgccttgatcgttgggaaccggagctgaatgaagccataccaaacgacgagcgtgacaccacgatgcctgtagcaatggcaacaacgttgcgcaaactattaactggcgaactacttactctagcttcccggcaacaattaatagactggatggaggcggataaagttgcaggaccacttctgcgctcggcccttccggctggctggtttattgctgataaatctggagccggtgagcgtgggtctcgcggtatcattgcagcactggggccagatggtaagccctcccgtatcgtagttatctacacgacggggagtcaggcaactatggatgaacgaaatagacagatcgctgagataggtgcctcactgattaagcattggtaactgtcagaccaagtttactcatatatactttagattgatttaaaacttcatttttaatttaaaaggatctaggtgaagatcctttttgataatctcatgaccaaaatcccttaacgtgagttttcgttccactgagcgtcagaccccgtagaaaagatcaaaggatcttcttgagatcctttttttctgcgcgtaatctgctgcttgcaaacaaaaaaaccaccgctaccagcggtggtttgtttgccggatcaagagctaccaactctttttccgaaggtaactggcttcagcagagcgcagataccaaatactgtccttctagtgtagccgtagttaggccaccacttcaagaactctgtagcaccgcctacatacctcgctctgctaatcctgttaccagtggctgctgccagtggcgataagtcgtgtcttaccgggttggactcaagacgatagttaccggataaggcgcagcggtcgggctgaacggggggttcgtgcacacagcccagcttggagcgaacgacctacaccgaactgagatacctacagcgtgagctatgagaaagcgccacgcttcccgaagggagaaaggcggacaggtatccggtaagcggcagggtcggaacaggagagcgcacgagggagcttccagggggaaacgcctggtatctttatagtcctgtcgggtttcgccacctctgacttgagcgtcgatttttgtgatgctcgtcaggggggcggagcctatggaaaaacgccagcaacgcggcctttttacggttcctggccttttgctggccttttgctcacatgttctttcctgcgttatcccctgattctgtggataaccgtattaccgcctttgagtgagctgataccgctcgccgcagccgaacgaccgagcgcagcgagtcagtgagcgaggaagcggaagagcgcccaatacgcaaaccgcctctccccgcgcgttggccgattcattaatgcagctggcacgacaggtttcccgactggaaagcgggcagtgagcgcaacgcaattaatgtgagttagctcactcattaggcaccccaggctttacactttatgcttccggctcgtatgttgtgtggaattgtgagcggataacaatttcacacaggaaacagcatatgcaaacaagcattactctgacatccaacgcatccggtacgtttgacggttactattacgaactctggaaggatactggcaatacaacaatgacggtctacactcaaggtcgcttttcctgccagtggtcgaacatcaataacgcgttgtttaggaccgggaagaaatacaaccagaattggcagtctcttggcacaatccggatcacgtactctgcgacttacaacccaaacgggaactcctacttgtgtatctatggctggtctaccaacccattggtcgagttctacatcgttgagtcctgggggaactggagaccgcctggtgccacgtccctgggccaagtgacaatcgatggcgggacctacgacatctataggacgacacgcgtcaaccagccttgcttcgctaaggggactgaggtcatgatgcacgacggctctgtgaaggctattgagactatcgaggcgggggaggctgttatggggaccgacggccagccaaggaaggtggtcggcctccctcgggggagggaggtcatgtacaaggtttcccagaagacggcgcaccgggtgcataagaccgacgagacgcgcgccgctccagtcgctctcttcgagtacaactgcaatgccacacacaagctggttgtgaggactcctcggagctgccgctcgatcacccgcaagatgcagggcgttgactacaacgaggtcatcttcttcgacctcaagaagaagaagctggaggacggccgcgagatcgagattgtcaaggaggtttcgaggtcttacccagctgctgagggcgctgagaaggctgctcagatggtgaaggactactacgatgccgcgcgcgggaaggagttcttcgagtggacaatcgaggcgagggatgttagggagctcggcgctcacgtgaggaaggctactcatcaggtgtacgccccagtcctgtacgagagcgacttcttcttccattacgtgaagaactcgaagttcgctctgaggtctgaggcctcaacagctctcgcctacctcctgggcctgtgggtcggcgacgggctctccgatagggctgtgctgtccgtcgacagcgaggattccagcctcctggagcgcatcactggctacgccgacattctcgatctgagcgcggagtacaaggaccgcgagatcccgaagagggcgaagaccgtctgcctctaccccaagacgatccgcggcaacgatattcgcaggaacctgaatacggacaacccggtctggaatgccatcgttgacctcggctacctgaaggatggggttaagaatgtgccctcgtacctcttctcagactccatctgccacagggaggtgttcctcgcgggcctgattgactctgatgggcatgtccggggcgacgatgggctgtcagttacaatcaagactattcacaagaccgtcatggagggcacggtggctgtcgctaggtcgctcgggctgatcgtttctgtgaacaccgaggaggcgaagattgacaagaacgatgtgaatcaccgcttcgtctacgctatctacatttcaggcggggacgctctcctgtccgtgctcgctcattgcgctgctgcgaagaagttcagggctccaccatccaatgaggtcgttcgggggctcaagaaggtcttcttcgagatggaggagctgaaggaggacgattactacggcatcacgctcgctaaggagtcagaccatcagttcctgctcgccaatcagctcgtggttcataattccattgtggggacagccacgttcgatcagtactggagcgtgcgcacctctaagcggacttcaggaacagtgaccgtgaccgatcacttccgcgcctgggcgaaccggggcctgaacctcggcacaatagaccaaattacattgtgcgtggagggttaccaaagctctggatcagccaacatcacccagaacaccttctctcagggctcttcttccggcagttcgggtggctcatccggctccacaacgactactcgcatcgagtgtgagaacatgtccttgtccggaccctacgttagcaggatcaccaatccctttaatggtattgcgctgtacgccaacggagacacagcccgcgctaccgttaacttccccgcaagtcgcaactacaatttccgcctgcggggttgcggcaacaacaataatcttgcccgtgtggacctgaggatcgacggacggaccgtcgggaccttttattaccagggcacatacccctgggaggccccaattgacaatgtttatgtcagtgcggggagtcatacagtcgaaatcactgttactgcggataacggcacatgggacgtgtatgccgactacctggtgatacagtgactcgagggggggcccggtacccaattcgccctatagtgagtcgtattacaattcactggccgtcgttttacaacgtcgtgactgggaaaaccctggcgttacccaacttaatcgccttgcagcacatccccctttcgccagctggcgtaatagcgaagaggcccgcaccgatcgcccttcccaacagttgcgcagcctgaatggcgaatggaaattgtaagcgttaatattttgttaaaattcgcgttaaatttttgttaaatcagctcattttttaaccaataggccgaaatcggcaaaatcccttataaatcaaaagaatagaccgagatagggttgagtgttgttccagtttggaacaagagtccactattaaagaacgtggactccaacgtcaaagggcgaaaaaccgtctatcagggcgatggcccactacgtgaaccatcaccctaatcaagttttttggggtcgaggtgccgtaaagcactaaatcggaaccctaaagggagcccccgatttagagcttgacggggaaagccggcgaacgtggcgagaaaggaagggaagaaagcgaaaggagcgggcgctagggcgctggcaagtgtagcggtcacgctgcgcgtaaccaccacacccgccgcgcttaatgcgccgctacagggcgcgtcaggtg

SEQ ID NO: 3157 - DNA, 5180 bp, Artificial Sequence
  Synthetic Construct, AS-157 intein modified protein encoding nucleic acids in pBluescript
gcacttttcggggaaatgtgcgcggaacccctatttgtttatttttctaaatacattcaaatatgtatccgctcatgagacaataaccctgataaatgcttcaataatattgaaaaaggaagagtatgagtattcaacatttccgtgtcgcccttattcccttttttgcggcattttgccttcctgtttttgctcacccagaaacgctggtgaaagtaaaagatgctgaagatcagttgggtgcacgagtgggttacatcgaactggatctcaacagcggtaagatccttgagagttttcgccccgaagaacgttttccaatgatgagcacttttaaagttctgctatgtggcgcggtattatcccgtattgacgccgggcaagagcaactcggtcgccgcatacactattctcagaatgacttggttgagtactcaccagtcacagaaaagcatcttacggatggcatgacagtaagagaattatgcagtgctgccataaccatgagtgataacactgcggccaacttacttctgacaacgatcggaggaccgaaggagctaaccgcttttttgcacaacatgggggatcatgtaactcgccttgatcgttgggaaccggagctgaatgaagccataccaaacgacgagcgtgacaccacgatgcctgtagcaatggcaacaacgttgcgcaaactattaactggcgaactacttactctagcttcccggcaacaattaatagactggatggaggcggataaagttgcaggaccacttctgcgctcggcccttccggctggctggtttattgctgataaatctggagccggtgagcgtgggtctcgcggtatcattgcagcactggggccagatggtaagccctcccgtatcgtagttatctacacgacggggagtcaggcaactatggatgaacgaaatagacagatcgctgagataggtgcctcactgattaagcattggtaactgtcagaccaagtttactcatatatactttagattgatttaaaacttcatttttaatttaaaaggatctaggtgaagatcctttttgataatctcatgaccaaaatcccttaacgtgagttttcgttccactgagcgtcagaccccgtagaaaagatcaaaggatcttcttgagatcctttttttctgcgcgtaatctgctgcttgcaaacaaaaaaaccaccgctaccagcggtggtttgtttgccggatcaagagctaccaactctttttccgaaggtaactggcttcagcagagcgcagataccaaatactgtccttctagtgtagccgtagttaggccaccacttcaagaactctgtagcaccgcctacatacctcgctctgctaatcctgttaccagtggctgctgccagtggcgataagtcgtgtcttaccgggttggactcaagacgatagttaccggataaggcgcagcggtcgggctgaacggggggttcgtgcacacagcccagcttggagcgaacgacctacaccgaactgagatacctacagcgtgagctatgagaaagcgccacgcttcccgaagggagaaaggcggacaggtatccggtaagcggcagggtcggaacaggagagcgcacgagggagcttccagggggaaacgcctggtatctttatagtcctgtcgggtttcgccacctctgacttgagcgtcgatttttgtgatgctcgtcaggggggcggagcctatggaaaaacgccagcaacgcggcctttttacggttcctggccttttgctggccttttgctcacatgttctttcctgcgttatcccctgattctgtggataaccgtattaccgcctttgagtgagctgataccgctcgccgcagccgaacgaccgagcgcagcgagtcagtgagcgaggaagcggaagagcgcccaatacgcaaaccgcctctccccgcgcgttggccgattcattaatgcagctggcacgacaggtttcccgactggaaagcgggcagtgagcgcaacgcaattaatgtgagttagctcactcattaggcaccccaggctttacactttatgcttccggctcgtatgttgtgtggaattgtgagcggataacaatttcacacaggaaacagcatatgcaaacaagcattactctgacatccaacgcatccggtacgtttgacggttactattacgaactctggaaggatactggcaatacaacaatgacggtctacactcaaggtcgcttttcctgccagtggtcgaacatcaataacgcgttgtttaggaccgggaagaaatacaaccagaattggcagtctcttggcacaatccggatcacgtactctgcgacttacaacccaaacgggaactcctacttgtgtatctatggctggtctaccaacccattggtcgagttctacatcgttgagtcctgggggaactggagaccgcctggtgccacgtccctgggccaagtgacaatcgatggcgggacctacgacatctataggacgacacgcgtcaaccagccttgcttcgccaagggcactgaggttatgatgtcggatgggtcaattaaggaggtggagggcattgaggtcgggcaggaggtcatgggcaaggacggcaagccgcgggaggtggtcggcaccccatcggggcgcgagaagatgtacaaggtctctcacaagaccgctcacagggcccataagtccgacagcacgtcggagcggttcggcctcttcgagtacacatgcaacgccactcataagctggttgtgcgcacctctaggtcatgccggccgctcgtcaggaacatccagggcacggactacgtcgaggtttgcctcttcaatatgaccaagaagacgctggaggacggccgcgtgatcgatattgtcgaggagaccagcgatttctacccagcggtggaggggcctgagaaggctctcaggatcctgaaggagtacgctgaggccgacggcgggaaggagtacttcgagtggacaattgaggctcgcgatgtggctctcctgagcgctcaggtcaggaaggctacttaccagctgtcggcccccgtgctcctggagaacaatcacttctctcattacctcaaggactccaacagcgctgttggcaatgatacagtgcgggccctgtcctacttcctcgggctgtggatcggcgacgggatgctcaacaatgccgcgacgttctcagtcgattcccagaacgcgagcctcctgaacaggattaatgagttcgccgaggtgctcggcctgtctgcggagtacaaggactcacaggagccaaagcgggccaagaccgttaacctgtacgcgaaggctatccgcgacgagggcgtgaggaagaacctcgatacgcacaatctcctgtgggacgcgatcgtcgatctcggctacctgaaggacgattcgaagaacgttcctgggtacatttgctcggactctttccagcatcgggaggtgttcctggcgggcatcattgacagcacaggctacgtgtccgatgagaccgccacggtgaagactatcgaccagtccgtcatgacaggcactgtggctgtcgctaggtccctcgggattaacgttagcgtggacgtcgaggttgacgaggatggcgtcgatcggtcattcgtttacgccatctacatggacaggtccgatgctctcctggctgtcctggctaactgcgcttccaacaataagcagatcgaggctccaccacacggcgtgattagggagttcaataaggcttacttcgagatggaggagctggaggaggacgagtactacgggctgactctctcaaatgagtcggatcatcagttcctcctcgctaatcagctcgtcgtgcataattccattgtggggacagccacgttcgatcagtactggagcgtgcgcacctctaagcggacttcaggaacagtgaccgtgaccgatcacttccgcgcctgggcgaaccggggcctgaacctcggcacaatagaccaaattacattgtgcgtggagggttaccaaagctctggatcagccaacatcacccagaacaccttctctcagggctcttcttccggcagttcgggtggctcatccggctccacaacgactactcgcatcgagtgtgagaacatgtccttgtccggaccctacgttagcaggatcaccaatccctttaatggtattgcgctgtacgccaacggagacacagcccgcgctaccgttaacttccccgcaagtcgcaactacaatttccgcctgcggggttgcggcaacaacaataatcttgcccgtgtggacctgaggatcgacggacggaccgtcgggaccttttattaccagggcacatacccctgggaggccccaattgacaatgtttatgtcagtgcggggagtcatacagtcgaaatcactgttactgcggataacggcacatgggacgtgtatgccgactacctggtgatacagtgactcgagggggggcccggtacccaattcgccctatagtgagtcgtattacaattcactggccgtcgttttacaacgtcgtgactgggaaaaccctggcgttacccaacttaatcgccttgcagcacatccccctttcgccagctggcgtaatagcgaagaggcccgcaccgatcgcccttcccaacagttgcgcagcctgaatggcgaatggaaattgtaagcgttaatattttgttaaaattcgcgttaaatttttgttaaatcagctcattttttaaccaataggccgaaatcggcaaaatcccttataaatcaaaagaatagaccgagatagggttgagtgttgttccagtttggaacaagagtccactattaaagaacgtggactccaacgtcaaagggcgaaaaaccgtctatcagggcgatggcccactacgtgaaccatcaccctaatcaagttttttggggtcgaggtgccgtaaagcactaaatcggaaccctaaagggagcccccgatttagagcttgacggggaaagccggcgaacgtggcgagaaaggaagggaagaaagcgaaaggagcgggcgctagggcgctggcaagtgtagcggtcacgctgcgcgtaaccaccacacccgccgcgcttaatgcgccgctacagggcgcgtcaggtg

SEQ ID NO: 3158 - DNA, 4868 bp, Artificial Sequence
  Synthetic Construct, AT-1 intein modified protein encoding nucleic acids in pBluescript
gcacttttcggggaaatgtgcgcggaacccctatttgtttatttttctaaatacattcaaatatgtatccgctcatgagacaataaccctgataaatgcttcaataatattgaaaaaggaagagtatgagtattcaacatttccgtgtcgcccttattcccttttttgcggcattttgccttcctgtttttgctcacccagaaacgctggtgaaagtaaaagatgctgaagatcagttgggtgcacgagtgggttacatcgaactggatctcaacagcggtaagatccttgagagttttcgccccgaagaacgttttccaatgatgagcacttttaaagttctgctatgtggcgcggtattatcccgtattgacgccgggcaagagcaactcggtcgccgcatacactattctcagaatgacttggttgagtactcaccagtcacagaaaagcatcttacggatggcatgacagtaagagaattatgcagtgctgccataaccatgagtgataacactgcggccaacttacttctgacaacgatcggaggaccgaaggagctaaccgcttttttgcacaacatgggggatcatgtaactcgccttgatcgttgggaaccggagctgaatgaagccataccaaacgacgagcgtgacaccacgatgcctgtagcaatggcaacaacgttgcgcaaactattaactggcgaactacttactctagcttcccggcaacaattaatagactggatggaggcggataaagttgcaggaccacttctgcgctcggcccttccggctggctggtttattgctgataaatctggagccggtgagcgtgggtctcgcggtatcattgcagcactggggccagatggtaagccctcccgtatcgtagttatctacacgacggggagtcaggcaactatggatgaacgaaatagacagatcgctgagataggtgcctcactgattaagcattggtaactgtcagaccaagtttactcatatatactttagattgatttaaaacttcatttttaatttaaaaggatctaggtgaagatcctttttgataatctcatgaccaaaatcccttaacgtgagttttcgttccactgagcgtcagaccccgtagaaaagatcaaaggatcttcttgagatcctttttttctgcgcgtaatctgctgcttgcaaacaaaaaaaccaccgctaccagcggtggtttgtttgccggatcaagagctaccaactctttttccgaaggtaactggcttcagcagagcgcagataccaaatactgtccttctagtgtagccgtagttaggccaccacttcaagaactctgtagcaccgcctacatacctcgctctgctaatcctgttaccagtggctgctgccagtggcgataagtcgtgtcttaccgggttggactcaagacgatagttaccggataaggcgcagcggtcgggctgaacggggggttcgtgcacacagcccagcttggagcgaacgacctacaccgaactgagatacctacagcgtgagctatgagaaagcgccacgcttcccgaagggagaaaggcggacaggtatccggtaagcggcagggtcggaacaggagagcgcacgagggagcttccagggggaaacgcctggtatctttatagtcctgtcgggtttcgccacctctgacttgagcgtcgatttttgtgatgctcgtcaggggggcggagcctatggaaaaacgccagcaacgcggcctttttacggttcctggccttttgctggccttttgctcacatgttctttcctgcgttatcccctgattctgtggataaccgtattaccgcctttgagtgagctgataccgctcgccgcagccgaacgaccgagcgcagcgagtcagtgagcgaggaagcggaagagcgcccaatacgcaaaccgcctctccccgcgcgttggccgattcattaatgcagctggcacgacaggtttcccgactggaaagcgggcagtgagcgcaacgcaattaatgtgagttagctcactcattaggcaccccaggctttacactttatgcttccggctcgtatgttgtgtggaattgtgagcggataacaatttcacacaggaaacagcatatgcaaacaagcattactctgacatccaacgcatccggtacgtttgacggttactattacgaactctggaaggatactggcaatacaacaatgacggtctacactcaaggtcgcttttcctgccagtggtcgaacatcaataacgcgttgtttaggaccgggaagaaatacaaccagaattggcagtctcttggcacaatccggatcacgtactctgcgacttacaacccaaacgggaactcctacttgtgtatctatggctggtctaccaacccattggtcgagttctacatcgttgagtcctgggggaactggagaccgcctggtgcctgcttcatcgaggggacggaggttctcactaagcgggggttcgtggatttcagggagctgcgggaggatgatctggtcgctcagtacgacatcgagaccggcgagatttcctggacgaagccatacgcttacgtcgagcgggattacgagggctccatgtaccgcctgaagcaccctaagagcaactgggaggtggtcgctaccgagggccatgagttcatcgtgaggaatctgaagacggggaaggagcggaaggagccaatcgagaaggtcaagctccacccatactccgctattcctgttgctggcaggtacacaggggaggtggaggagtacgacctctgggagctggtctcgggcaaggggatcacactcaagactaggtctgccgttaagaacaagctgaccccgatcgagaagctcctgattgtgctccaggcggacggcacaattgattcaaagcgcaatggcaagttcactgggttccagcagctgaagttcttcttctccaagtacaggaagatcaacgagttcgagaagattctcaatgagtgcgcgccgtacggcatcaagtggaagaagtacgagcgccaggacgggattgcttacacagtttactaccccaacgatctgccgatcaagcccactaagttcttcgacgagtgggtgcgcctcgatgagatcacggaggagtggattagggagttcgtggaggagctggtcaagtgggacggccatatcccgaaggatcggaacaagaagaaggtctactactacagcaccaaggagaagcgcaataaggacttcgttcaggctctctgcgctctgggcgggatgaggacggttgtgtcgcgcgagaggaacccgaaggccaagaatcccgtctaccggatctggatctacctggaggacgattacatcaacacccagacgatggtgaaggaggagttctactacaagggcaaggtctactgcgtttctgttccaaagggcaacatcgtggttaggtacaaggattctgtctgcattgctggcaacacgtccctgggccaagtgacaatcgatggcgggacctacgacatctataggacgacacgcgtcaaccagccttccattgtggggacagccacgttcgatcagtactggagcgtgcgcacctctaagcggacttcaggaacagtgaccgtgaccgatcacttccgcgcctgggcgaaccggggcctgaacctcggcacaatagaccaaattacattgtgcgtggagggttaccaaagctctggatcagccaacatcacccagaacaccttctctcagggctcttcttccggcagttcgggtggctcatccggctccacaacgactactcgcatcgagtgtgagaacatgtccttgtccggaccctacgttagcaggatcaccaatccctttaatggtattgcgctgtacgccaacggagacacagcccgcgctaccgttaacttccccgcaagtcgcaactacaatttccgcctgcggggttgcggcaacaacaataatcttgcccgtgtggacctgaggatcgacggacggaccgtcgggaccttttattaccagggcacatacccctgggaggccccaattgacaatgtttatgtcagtgcggggagtcatacagtcgaaatcactgttactgcggataacggcacatgggacgtgtatgccgactacctggtgatacagtgactcgagggggggcccggtacccaattcgccctatagtgagtcgtattacaattcactggccgtcgttttacaacgtcgtgactgggaaaaccctggcgttacccaacttaatcgccttgcagcacatccccctttcgccagctggcgtaatagcgaagaggcccgcaccgatcgcccttcccaacagttgcgcagcctgaatggcgaatggaaattgtaagcgttaatattttgttaaaattcgcgttaaatttttgttaaatcagctcattttttaaccaataggccgaaatcggcaaaatcccttataaatcaaaagaatagaccgagatagggttgagtgttgttccagtttggaacaagagtccactattaaagaacgtggactccaacgtcaaagggcgaaaaaccgtctatcagggcgatggcccactacgtgaaccatcaccctaatcaagttttttggggtcgaggtgccgtaaagcactaaatcggaaccctaaagggagcccccgatttagagcttgacggggaaagccggcgaacgtggcgagaaaggaagggaagaaagcgaaaggagcgggcgctagggcgctggcaagtgtagcggtcacgctgcgcgtaaccaccacacccgccgcgcttaatgcgccgctacagggcgcgtcaggtg

SEQ ID NO: 3159 - DNA, 4289 bp, Artificial Sequence
  Synthetic Construct, AT-2 intein modified protein encoding nucleic acids in pBluescript
gcacttttcggggaaatgtgcgcggaacccctatttgtttatttttctaaatacattcaaatatgtatccgctcatgagacaataaccctgataaatgcttcaataatattgaaaaaggaagagtatgagtattcaacatttccgtgtcgcccttattcccttttttgcggcattttgccttcctgtttttgctcacccagaaacgctggtgaaagtaaaagatgctgaagatcagttgggtgcacgagtgggttacatcgaactggatctcaacagcggtaagatccttgagagttttcgccccgaagaacgttttccaatgatgagcacttttaaagttctgctatgtggcgcggtattatcccgtattgacgccgggcaagagcaactcggtcgccgcatacactattctcagaatgacttggttgagtactcaccagtcacagaaaagcatcttacggatggcatgacagtaagagaattatgcagtgctgccataaccatgagtgataacactgcggccaacttacttctgacaacgatcggaggaccgaaggagctaaccgcttttttgcacaacatgggggatcatgtaactcgccttgatcgttgggaaccggagctgaatgaagccataccaaacgacgagcgtgacaccacgatgcctgtagcaatggcaacaacgttgcgcaaactattaactggcgaactacttactctagcttcccggcaacaattaatagactggatggaggcggataaagttgcaggaccacttctgcgctcggcccttccggctggctggtttattgctgataaatctggagccggtgagcgtgggtctcgcggtatcattgcagcactggggccagatggtaagccctcccgtatcgtagttatctacacgacggggagtcaggcaactatggatgaacgaaatagacagatcgctgagataggtgcctcactgattaagcattggtaactgtcagaccaagtttactcatatatactttagattgatttaaaacttcatttttaatttaaaaggatctaggtgaagatcctttttgataatctcatgaccaaaatcccttaacgtgagttttcgttccactgagcgtcagaccccgtagaaaagatcaaaggatcttcttgagatcctttttttctgcgcgtaatctgctgcttgcaaacaaaaaaaccaccgctaccagcggtggtttgtttgccggatcaagagctaccaactctttttccgaaggtaactggcttcagcagagcgcagataccaaatactgtccttctagtgtagccgtagttaggccaccacttcaagaactctgtagcaccgcctacatacctcgctctgctaatcctgttaccagtggctgctgccagtggcgataagtcgtgtcttaccgggttggactcaagacgatagttaccggataaggcgcagcggtcgggctgaacggggggttcgtgcacacagcccagcttggagcgaacgacctacaccgaactgagatacctacagcgtgagctatgagaaagcgccacgcttcccgaagggagaaaggcggacaggtatccggtaagcggcagggtcggaacaggagagcgcacgagggagcttccagggggaaacgcctggtatctttatagtcctgtcgggtttcgccacctctgacttgagcgtcgatttttgtgatgctcgtcaggggggcggagcctatggaaaaacgccagcaacgcggcctttttacggttcctggccttttgctggccttttgctcacatgttctttcctgcgttatcccctgattctgtggataaccgtattaccgcctttgagtgagctgataccgctcgccgcagccgaacgaccgagcgcagcgagtcagtgagcgaggaagcggaagagcgcccaatacgcaaaccgcctctccccgcgcgttggccgattcattaatgcagctggcacgacaggtttcccgactggaaagcgggcagtgagcgcaacgcaattaatgtgagttagctcactcattaggcaccccaggctttacactttatgcttccggctcgtatgttgtgtggaattgtgagcggataacaatttcacacaggaaacagcatatgcaaacaagcattactctgacatccaacgcatccggtacgtttgacggttactattacgaactctggaaggatactggcaatacaacaatgacggtctacactcaaggtcgcttttcctgccagtggtcgaacatcaataacgcgttgtttaggaccgggaagaaatacaaccagaattggcagtctcttggcacaatccggatcacgtactctgcgacttacaacccaaacgggaactcctacttgtgtatctatggctggtctaccaacccattggtcgagttctacatcgttgagtcctgggggaactggagaccgcctggtgcctgccagccttactctgcgccggtttcaactcctgatgggcctattcctatcggcaagctcgtggacgctaatgcggtcggggagaaggtgttcgacgcgtcgggcgtcaccaggattgttgctaccacgtgcaacgggaggaagccagtcctccgcatcaggacatccggcgggcacgttctcgacgtgactccagatcatctggtttggcaggtggtcgaccagaccgctggcaggttcgtgccagctggccagctccgggtcggggataggctggagtggcacgacagggccaattccgatgctatggtcgctgcgttcacggctgacagcgctgctgcggctcagccaggccagatcgttgacattctcgcgatcgatgagctgggcgtgatgcctgtctacgatattcagacagagtcgggggagtacctctcagatggcattagggttcataacacgtccctgggccaagtgacaatcgatggcgggacctacgacatctataggacgacacgcgtcaaccagccttccattgtggggacagccacgttcgatcagtactggagcgtgcgcacctctaagcggacttcaggaacagtgaccgtgaccgatcacttccgcgcctgggcgaaccggggcctgaacctcggcacaatagaccaaattacattgtgcgtggagggttaccaaagctctggatcagccaacatcacccagaacaccttctctcagggctcttcttccggcagttcgggtggctcatccggctccacaacgactactcgcatcgagtgtgagaacatgtccttgtccggaccctacgttagcaggatcaccaatccctttaatggtattgcgctgtacgccaacggagacacagcccgcgctaccgttaacttccccgcaagtcgcaactacaatttccgcctgcggggttgcggcaacaacaataatcttgcccgtgtggacctgaggatcgacggacggaccgtcgggaccttttattaccagggcacatacccctgggaggccccaattgacaatgtttatgtcagtgcggggagtcatacagtcgaaatcactgttactgcggataacggcacatgggacgtgtatgccgactacctggtgatacagtgactcgagggggggcccggtacccaattcgccctatagtgagtcgtattacaattcactggccgtcgttttacaacgtcgtgactgggaaaaccctggcgttacccaacttaatcgccttgcagcacatccccctttcgccagctggcgtaatagcgaagaggcccgcaccgatcgcccttcccaacagttgcgcagcctgaatggcgaatggaaattgtaagcgttaatattttgttaaaattcgcgttaaatttttgttaaatcagctcattttttaaccaataggccgaaatcggcaaaatcccttataaatcaaaagaatagaccgagatagggttgagtgttgttccagtttggaacaagagtccactattaaagaacgtggactccaacgtcaaagggcgaaaaaccgtctatcagggcgatggcccactacgtgaaccatcaccctaatcaagttttttggggtcgaggtgccgtaaagcactaaatcggaaccctaaagggagcccccgatttagagcttgacggggaaagccggcgaacgtggcgagaaaggaagggaagaaagcgaaaggagcgggcgctagggcgctggcaagtgtagcggtcacgctgcgcgtaaccaccacacccgccgcgcttaatgcgccgctacagggcgcgtcaggtg

SEQ ID NO: 3160 - DNA, 5084 bp, Artificial Sequence
  Synthetic Construct, AT-3 intein modified protein encoding nucleic acids in pBluescript
gcacttttcggggaaatgtgcgcggaacccctatttgtttatttttctaaatacattcaaatatgtatccgctcatgagacaataaccctgataaatgcttcaataatattgaaaaaggaagagtatgagtattcaacatttccgtgtcgcccttattcccttttttgcggcattttgccttcctgtttttgctcacccagaaacgctggtgaaagtaaaagatgctgaagatcagttgggtgcacgagtgggttacatcgaactggatctcaacagcggtaagatccttgagagttttcgccccgaagaacgttttccaatgatgagcacttttaaagttctgctatgtggcgcggtattatcccgtattgacgccgggcaagagcaactcggtcgccgcatacactattctcagaatgacttggttgagtactcaccagtcacagaaaagcatcttacggatggcatgacagtaagagaattatgcagtgctgccataaccatgagtgataacactgcggccaacttacttctgacaacgatcggaggaccgaaggagctaaccgcttttttgcacaacatgggggatcatgtaactcgccttgatcgttgggaaccggagctgaatgaagccataccaaacgacgagcgtgacaccacgatgcctgtagcaatggcaacaacgttgcgcaaactattaactggcgaactacttactctagcttcccggcaacaattaatagactggatggaggcggataaagttgcaggaccacttctgcgctcggcccttccggctggctggtttattgctgataaatctggagccggtgagcgtgggtctcgcggtatcattgcagcactggggccagatggtaagccctcccgtatcgtagttatctacacgacggggagtcaggcaactatggatgaacgaaatagacagatcgctgagataggtgcctcactgattaagcattggtaactgtcagaccaagtttactcatatatactttagattgatttaaaacttcatttttaatttaaaaggatctaggtgaagatcctttttgataatctcatgaccaaaatcccttaacgtgagttttcgttccactgagcgtcagaccccgtagaaaagatcaaaggatcttcttgagatcctttttttctgcgcgtaatctgctgcttgcaaacaaaaaaaccaccgctaccagcggtggtttgtttgccggatcaagagctaccaactctttttccgaaggtaactggcttcagcagagcgcagataccaaatactgtccttctagtgtagccgtagttaggccaccacttcaagaactctgtagcaccgcctacatacctcgctctgctaatcctgttaccagtggctgctgccagtggcgataagtcgtgtcttaccgggttggactcaagacgatagttaccggataaggcgcagcggtcgggctgaacggggggttcgtgcacacagcccagcttggagcgaacgacctacaccgaactgagatacctacagcgtgagctatgagaaagcgccacgcttcccgaagggagaaaggcggacaggtatccggtaagcggcagggtcggaacaggagagcgcacgagggagcttccagggggaaacgcctggtatctttatagtcctgtcgggtttcgccacctctgacttgagcgtcgatttttgtgatgctcgtcaggggggcggagcctatggaaaaacgccagcaacgcggcctttttacggttcctggccttttgctggccttttgctcacatgttctttcctgcgttatcccctgattctgtggataaccgtattaccgcctttgagtgagctgataccgctcgccgcagccgaacgaccgagcgcagcgagtcagtgagcgaggaagcggaagagcgcccaatacgcaaaccgcctctccccgcgcgttggccgattcattaatgcagctggcacgacaggtttcccgactggaaagcgggcagtgagcgcaacgcaattaatgtgagttagctcactcattaggcaccccaggctttacactttatgcttccggctcgtatgttgtgtggaattgtgagcggataacaatttcacacaggaaacagcatatgcaaacaagcattactctgacatccaacgcatccggtacgtttgacggttactattacgaactctggaaggatactggcaatacaacaatgacggtctacactcaaggtcgcttttcctgccagtggtcgaacatcaataacgcgttgtttaggaccgggaagaaatacaaccagaattggcagtctcttggcacaatccggatcacgtactctgcgacttacaacccaaacgggaactcctacttgtgtatctatggctggtctaccaacccattggtcgagttctacatcgttgagtcctgggggaactggagaccgcctggtgcctgcgttacaggggacacaagggtcctcctcgcggacgggcagcgggttcctattcgggatctcgtggggcagacgcctgaggtcatttctgtcaacgctgagggcaggctggagccagctaagaccgacctcgtgtggtccgttggggtgcgccctctcctgcaggtcaggctggcttccggcaggaccatcaggtgcacgccagagcacaggctcaggggcctgtgggattggaaggaggcccgcgacatcagggtcggggataggctgggcattgctcgggagctcccagctccaaaggtgacgaagcgctgggctgagcacgagctggtgctcctggctcatctcgtcggcgacgggtcctacattaagggccagccactgaggtacaccacggcttcagaggcgaactccgaggctgttagcagggccgctgaggctatgggctctacagtgactaggcacccaggcagggggcagtggcatcagctcgtcatctcaggcaacgggaataggtggcacccacagggcgttgggaagtggctcaagcagctgggggtgttcggccagaggagccgggagaagcacctgccacaggaggtgttccagctcgacaatgatcagctggccctcttcctgaggcatctgtgggcgacagacggctcgatcactcaggggtctgctggccgccctaggatctacttctcgacggcctctcggcacctcatccaggatgtcgctgccctcctgctccggttcgggatcgttggccgcacaaagcacattactcatggcgacggggagggctggttcacactggatatttcgggcgctgtccagcagcagaggtacctggagaagatcggggccttcggccaccaggctcataacgctaggagggctctccagcatctgaggggcctcgtcgagaacaccaatgttgacacgctgccggaggaggtgttcaattacatccgggagcgcatgagggaggaggggattacacacaggcagatggctgctctcaggggcactgcttacggcgggagcgctcatttcaccttctccccgagcagggagacgctgctctcgtacgcggacatcctcaacgatcagcggctgcgcatgctcgccaatcagcacgttttctgggaccgcgtggtctccgtggagcccgcgggcgaggaggaggtcttcgatctcacagttccgggcaatgcttgctggctcgcggatggcatcgtttcacacaacacgtccctgggccaagtgacaatcgatggcgggacctacgacatctataggacgacacgcgtcaaccagccttccattgtggggacagccacgttcgatcagtactggagcgtgcgcacctctaagcggacttcaggaacagtgaccgtgaccgatcacttccgcgcctgggcgaaccggggcctgaacctcggcacaatagaccaaattacattgtgcgtggagggttaccaaagctctggatcagccaacatcacccagaacaccttctctcagggctcttcttccggcagttcgggtggctcatccggctccacaacgactactcgcatcgagtgtgagaacatgtccttgtccggaccctacgttagcaggatcaccaatccctttaatggtattgcgctgtacgccaacggagacacagcccgcgctaccgttaacttccccgcaagtcgcaactacaatttccgcctgcggggttgcggcaacaacaataatcttgcccgtgtggacctgaggatcgacggacggaccgtcgggaccttttattaccagggcacatacccctgggaggccccaattgacaatgtttatgtcagtgcggggagtcatacagtcgaaatcactgttactgcggataacggcacatgggacgtgtatgccgactacctggtgatacagtgactcgagggggggcccggtacccaattcgccctatagtgagtcgtattacaattcactggccgtcgttttacaacgtcgtgactgggaaaaccctggcgttacccaacttaatcgccttgcagcacatccccctttcgccagctggcgtaatagcgaagaggcccgcaccgatcgcccttcccaacagttgcgcagcctgaatggcgaatggaaattgtaagcgttaatattttgttaaaattcgcgttaaatttttgttaaatcagctcattttttaaccaataggccgaaatcggcaaaatcccttataaatcaaaagaatagaccgagatagggttgagtgttgttccagtttggaacaagagtccactattaaagaacgtggactccaacgtcaaagggcgaaaaaccgtctatcagggcgatggcccactacgtgaaccatcaccctaatcaagttttttggggtcgaggtgccgtaaagcactaaatcggaaccctaaagggagcccccgatttagagcttgacggggaaagccggcgaacgtggcgagaaaggaagggaagaaagcgaaaggagcgggcgctagggcgctggcaagtgtagcggtcacgctgcgcgtaaccaccacacccgccgcgcttaatgcgccgctacagggcgcgtcaggtg

SEQ ID NO: 3161 - DNA, 5645 bp, Artificial Sequence
  Synthetic Construct, AT-4 intein modified protein encoding nucleic acids in pBluescript
gcacttttcggggaaatgtgcgcggaacccctatttgtttatttttctaaatacattcaaatatgtatccgctcatgagacaataaccctgataaatgcttcaataatattgaaaaaggaagagtatgagtattcaacatttccgtgtcgcccttattcccttttttgcggcattttgccttcctgtttttgctcacccagaaacgctggtgaaagtaaaagatgctgaagatcagttgggtgcacgagtgggttacatcgaactggatctcaacagcggtaagatccttgagagttttcgccccgaagaacgttttccaatgatgagcacttttaaagttctgctatgtggcgcggtattatcccgtattgacgccgggcaagagcaactcggtcgccgcatacactattctcagaatgacttggttgagtactcaccagtcacagaaaagcatcttacggatggcatgacagtaagagaattatgcagtgctgccataaccatgagtgataacactgcggccaacttacttctgacaacgatcggaggaccgaaggagctaaccgcttttttgcacaacatgggggatcatgtaactcgccttgatcgttgggaaccggagctgaatgaagccataccaaacgacgagcgtgacaccacgatgcctgtagcaatggcaacaacgttgcgcaaactattaactggcgaactacttactctagcttcccggcaacaattaatagactggatggaggcggataaagttgcaggaccacttctgcgctcggcccttccggctggctggtttattgctgataaatctggagccggtgagcgtgggtctcgcggtatcattgcagcactggggccagatggtaagccctcccgtatcgtagttatctacacgacggggagtcaggcaactatggatgaacgaaatagacagatcgctgagataggtgcctcactgattaagcattggtaactgtcagaccaagtttactcatatatactttagattgatttaaaacttcatttttaatttaaaaggatctaggtgaagatcctttttgataatctcatgaccaaaatcccttaacgtgagttttcgttccactgagcgtcagaccccgtagaaaagatcaaaggatcttcttgagatcctttttttctgcgcgtaatctgctgcttgcaaacaaaaaaaccaccgctaccagcggtggtttgtttgccggatcaagagctaccaactctttttccgaaggtaactggcttcagcagagcgcagataccaaatactgtccttctagtgtagccgtagttaggccaccacttcaagaactctgtagcaccgcctacatacctcgctctgctaatcctgttaccagtggctgctgccagtggcgataagtcgtgtcttaccgggttggactcaagacgatagttaccggataaggcgcagcggtcgggctgaacggggggttcgtgcacacagcccagcttggagcgaacgacctacaccgaactgagatacctacagcgtgagctatgagaaagcgccacgcttcccgaagggagaaaggcggacaggtatccggtaagcggcagggtcggaacaggagagcgcacgagggagcttccagggggaaacgcctggtatctttatagtcctgtcgggtttcgccacctctgacttgagcgtcgatttttgtgatgctcgtcaggggggcggagcctatggaaaaacgccagcaacgcggcctttttacggttcctggccttttgctggccttttgctcacatgttctttcctgcgttatcccctgattctgtggataaccgtattaccgcctttgagtgagctgataccgctcgccgcagccgaacgaccgagcgcagcgagtcagtgagcgaggaagcggaagagcgcccaatacgcaaaccgcctctccccgcgcgttggccgattcattaatgcagctggcacgacaggtttcccgactggaaagcgggcagtgagcgcaacgcaattaatgtgagttagctcactcattaggcaccccaggctttacactttatgcttccggctcgtatgttgtgtggaattgtgagcggataacaatttcacacaggaaacagcatatgcaaacaagcattactctgacatccaacgcatccggtacgtttgacggttactattacgaactctggaaggatactggcaatacaacaatgacggtctacactcaaggtcgcttttcctgccagtggtcgaacatcaataacgcgttgtttaggaccgggaagaaatacaaccagaattggcagtctcttggcacaatccggatcacgtactctgcgacttacaacccaaacgggaactcctacttgtgtatctatggctggtctaccaacccattggtcgagttctacatcgttgagtcctgggggaactggagaccgcctggtgcctgcctcgccaatgggacacagctgctgcgctacgatgggacaaaggtcaacgtggaggacgtgaaggagggggatctgctgctgggcccagacggcgggccaaggagggcgttcaacgtggtctccggcaaggaccgcctgtacaggatcaagattgacggggataaggaggatctcgttgtgaccgccaaccacatcctcgtgctgcatagggcgaaggctatgaatacgtctgtctgcttcgaccggtcaaaggagcagcagggcggggctggcgagcagctggacatttccgaggtcagcgccgcggagcgctacgataccgttgagatgacggctgctgagttcgctgctctgcacccacaggagaggtcctggtacagggctatcaggtgcccaggcttcgagctccctgagcaggacgtcccagttaacccttacttcctcggcctgtggctcggggatgagtcccggaaccagagcgctatctactcgaatcacgaggaggccctgcgcgagttcctcgtgagccatgccgcggagctggacatgcacctcgtttaccatggccagtcggcgtactctaccgtgtgcaacaaggatcgcccaacgaataagaggatcggccctgccaaccagacccagacggtcaggccaaccatccggcagacacggcgcactattaggcagcagaggctggctgctgagcacgctgctgctgagtacaccacgcagagggagacagcgtccctcactccgctcctggagtcacccacatccgacaagcatggcctcctgtccagcgtcgagactccagggaggctgtcagattccgttacaactgagctccccatgagcaggtcggcctctgctatgaggtcgatcaggaccgccagcggcctctcggagttcaacgacgtgacgaatgtctcagcttccatgccggatatccagaactctggcattaagaatcaggggaggatcgctaaggtgaccaggcagcaggactctaagggcgaggtcgatttccgccagcagtactcacaggccattaaggacgatctggagctcctggagacggacatcgaggacgatgtggcgtcgtctgacgagattgaggatgtctgcgtcgttggcagcgagaacgagctcatcgggtccgagaagcaggaccagagcggcaggaggaggcagattcacaggctgaggaccgggcataggggctacggggacctctcggacgatgagcaggagcagctcctggacagcgtggtcgagcgctacgcgggcgattcgcggctgaatacactccagcaggagctgagcaagatgggcatcctcaacccagagactgggcctatcaatgacaagaagcgcattccgcaggtgttcatgcagaacagccggtcggttcgcctgtcggtgctcgctggcctcctggactctgatgggtggtacatctaccccgagaatatgttcggcttcgctcagtccgagctgtgccacaaggagctcttctgggacgttgtgacactggctaggagcctcggcttcggggtctggacaaagaagcggatgatgccggaccccactggcaagcgcatgtcaccaatgctggtggcccagatctccggcgatctggcggagattccttgcgtcctcgctcgcaagaaggccatgccgaggctgatcccccagtctcactcattcgccatcaaggacatttctctggagtcagaggcgacggagtgggctggcttcagggtggataaggatcagctctacctcaggcatgactacgtggttctgcataatacgtccctgggccaagtgacaatcgatggcgggacctacgacatctataggacgacacgcgtcaaccagccttccattgtggggacagccacgttcgatcagtactggagcgtgcgcacctctaagcggacttcaggaacagtgaccgtgaccgatcacttccgcgcctgggcgaaccggggcctgaacctcggcacaatagaccaaattacattgtgcgtggagggttaccaaagctctggatcagccaacatcacccagaacaccttctctcagggctcttcttccggcagttcgggtggctcatccggctccacaacgactactcgcatcgagtgtgagaacatgtccttgtccggaccctacgttagcaggatcaccaatccctttaatggtattgcgctgtacgccaacggagacacagcccgcgctaccgttaacttccccgcaagtcgcaactacaatttccgcctgcggggttgcggcaacaacaataatcttgcccgtgtggacctgaggatcgacggacggaccgtcgggaccttttattaccagggcacatacccctgggaggccccaattgacaatgtttatgtcagtgcggggagtcatacagtcgaaatcactgttactgcggataacggcacatgggacgtgtatgccgactacctggtgatacagtgactcgagggggggcccggtacccaattcgccctatagtgagtcgtattacaattcactggccgtcgttttacaacgtcgtgactgggaaaaccctggcgttacccaacttaatcgccttgcagcacatccccctttcgccagctggcgtaatagcgaagaggcccgcaccgatcgcccttcccaacagttgcgcagcctgaatggcgaatggaaattgtaagcgttaatattttgttaaaattcgcgttaaatttttgttaaatcagctcattttttaaccaataggccgaaatcggcaaaatcccttataaatcaaaagaatagaccgagatagggttgagtgttgttccagtttggaacaagagtccactattaaagaacgtggactccaacgtcaaagggcgaaaaaccgtctatcagggcgatggcccactacgtgaaccatcaccctaatcaagttttttggggtcgaggtgccgtaaagcactaaatcggaaccctaaagggagcccccgatttagagcttgacggggaaagccggcgaacgtggcgagaaaggaagggaagaaagcgaaaggagcgggcgctagggcgctggcaagtgtagcggtcacgctgcgcgtaaccaccacacccgccgcgcttaatgcgccgctacagggcgcgtcaggtg

SEQ ID NO: 3162 - DNA, 5234 bp, Artificial Sequence
  Synthetic Construct, AT-5 intein modified protein encoding nucleic acids in pBluescript
gcacttttcggggaaatgtgcgcggaacccctatttgtttatttttctaaatacattcaaatatgtatccgctcatgagacaataaccctgataaatgcttcaataatattgaaaaaggaagagtatgagtattcaacatttccgtgtcgcccttattcccttttttgcggcattttgccttcctgtttttgctcacccagaaacgctggtgaaagtaaaagatgctgaagatcagttgggtgcacgagtgggttacatcgaactggatctcaacagcggtaagatccttgagagttttcgccccgaagaacgttttccaatgatgagcacttttaaagttctgctatgtggcgcggtattatcccgtattgacgccgggcaagagcaactcggtcgccgcatacactattctcagaatgacttggttgagtactcaccagtcacagaaaagcatcttacggatggcatgacagtaagagaattatgcagtgctgccataaccatgagtgataacactgcggccaacttacttctgacaacgatcggaggaccgaaggagctaaccgcttttttgcacaacatgggggatcatgtaactcgccttgatcgttgggaaccggagctgaatgaagccataccaaacgacgagcgtgacaccacgatgcctgtagcaatggcaacaacgttgcgcaaactattaactggcgaactacttactctagcttcccggcaacaattaatagactggatggaggcggataaagttgcaggaccacttctgcgctcggcccttccggctggctggtttattgctgataaatctggagccggtgagcgtgggtctcgcggtatcattgcagcactggggccagatggtaagccctcccgtatcgtagttatctacacgacggggagtcaggcaactatggatgaacgaaatagacagatcgctgagataggtgcctcactgattaagcattggtaactgtcagaccaagtttactcatatatactttagattgatttaaaacttcatttttaatttaaaaggatctaggtgaagatcctttttgataatctcatgaccaaaatcccttaacgtgagttttcgttccactgagcgtcagaccccgtagaaaagatcaaaggatcttcttgagatcctttttttctgcgcgtaatctgctgcttgcaaacaaaaaaaccaccgctaccagcggtggtttgtttgccggatcaagagctaccaactctttttccgaaggtaactggcttcagcagagcgcagataccaaatactgtccttctagtgtagccgtagttaggccaccacttcaagaactctgtagcaccgcctacatacctcgctctgctaatcctgttaccagtggctgctgccagtggcgataagtcgtgtcttaccgggttggactcaagacgatagttaccggataaggcgcagcggtcgggctgaacggggggttcgtgcacacagcccagcttggagcgaacgacctacaccgaactgagatacctacagcgtgagctatgagaaagcgccacgcttcccgaagggagaaaggcggacaggtatccggtaagcggcagggtcggaacaggagagcgcacgagggagcttccagggggaaacgcctggtatctttatagtcctgtcgggtttcgccacctctgacttgagcgtcgatttttgtgatgctcgtcaggggggcggagcctatggaaaaacgccagcaacgcggcctttttacggttcctggccttttgctggccttttgctcacatgttctttcctgcgttatcccctgattctgtggataaccgtattaccgcctttgagtgagctgataccgctcgccgcagccgaacgaccgagcgcagcgagtcagtgagcgaggaagcggaagagcgcccaatacgcaaaccgcctctccccgcgcgttggccgattcattaatgcagctggcacgacaggtttcccgactggaaagcgggcagtgagcgcaacgcaattaatgtgagttagctcactcattaggcaccccaggctttacactttatgcttccggctcgtatgttgtgtggaattgtgagcggataacaatttcacacaggaaacagcatatgcaaacaagcattactctgacatccaacgcatccggtacgtttgacggttactattacgaactctggaaggatactggcaatacaacaatgacggtctacactcaaggtcgcttttcctgccagtggtcgaacatcaataacgcgttgtttaggaccgggaagaaatacaaccagaattggcagtctcttggcacaatccggatcacgtactctgcgacttacaacccaaacgggaactcctacttgtgtatctatggctggtctaccaacccattggtcgagttctacatcgttgagtcctgggggaactggagaccgcctggtgcctcgctgccaccatgggagcctatcgtggtcaggcggggggatgaggttcgggttacatcaatcggggagttcgtggattctttcctggagggcgagggcgggctggacatcggcgggctcggctactacaccctgtcgctcgatacccggacgctgaagccagtctggaggaggatccgcggcgttattaagcaccggatccgcggcaggctcctgagggtcaaggcctcaaagggccgctccatcgacctgacgggctctcattcaatctacaggattagcaggggcgggggcctggaggtggtcggctccagcgacctgaggccaggcgattctctcgtgacacctgcttcagtcgagctcccagagtccgccccttcgtctattaacgctgcgagggagctgtggagccggggggtggagggcatcttcgttgtggggctcccaggcgaggctgctgggtacaggggcgtcgagcggtcgcgcggctacgacgggggccacgctatccctctggagacgctcgtggagcgctacggcgattcggtctggtctctggtttcaggcgcgaagctcgctgtttcccggggggctgctggcgaccacccagtgcccgccaccattccgctggatacggggttctacctcctgctcggcttcatcgtgtccgctggcagcgtggacgtcgaggggggccatgttacagtgactctcggcccagggagggagggctacgtgggcgatgtcgttgaggctgtcaactccactgctccaggcgctggggtccgcatttcatccggggcgaggggcatggaggttaccatcaggagccgggtgctgtcggagctgctcgctagggtgttcggcgctgggccaggccctaatcgggacatcccctctattgtcttcagggccccgaagcccatgaagcgggttttcctgaagggcctctacgctgggggcggggtcttcgaccggagctcgggcagcctgatctacgccaccgattcccgcagcctgctcaacggcctcgctctgctcctgctcaatgtgggcgctggcgggtacaggatcgactcgggggattctggcagggctctggcgctcattgtggagaatgctggcaggctcgacgctatcggcgaggtcctggagcacctcggcttccatggcgggagggaggctgttcagggggtgggcgctctggagagggctacagctgggctcgctggccaggctactgtcgctgttcagaggccagctacccgcggcgggccaggcgtggacgtcgcgggggtgacgggcctggagcacctggaggctagcacagagttcgtctacgatctctctgtggagggggatgagaacttcttcgccgggctcgggtggattctcgtgcataatacgtccctgggccaagtgacaatcgatggcgggacctacgacatctataggacgacacgcgtcaaccagccttccattgtggggacagccacgttcgatcagtactggagcgtgcgcacctctaagcggacttcaggaacagtgaccgtgaccgatcacttccgcgcctgggcgaaccggggcctgaacctcggcacaatagaccaaattacattgtgcgtggagggttaccaaagctctggatcagccaacatcacccagaacaccttctctcagggctcttcttccggcagttcgggtggctcatccggctccacaacgactactcgcatcgagtgtgagaacatgtccttgtccggaccctacgttagcaggatcaccaatccctttaatggtattgcgctgtacgccaacggagacacagcccgcgctaccgttaacttccccgcaagtcgcaactacaatttccgcctgcggggttgcggcaacaacaataatcttgcccgtgtggacctgaggatcgacggacggaccgtcgggaccttttattaccagggcacatacccctgggaggccccaattgacaatgtttatgtcagtgcggggagtcatacagtcgaaatcactgttactgcggataacggcacatgggacgtgtatgccgactacctggtgatacagtgactcgagggggggcccggtacccaattcgccctatagtgagtcgtattacaattcactggccgtcgttttacaacgtcgtgactgggaaaaccctggcgttacccaacttaatcgccttgcagcacatccccctttcgccagctggcgtaatagcgaagaggcccgcaccgatcgcccttcccaacagttgcgcagcctgaatggcgaatggaaattgtaagcgttaatattttgttaaaattcgcgttaaatttttgttaaatcagctcattttttaaccaataggccgaaatcggcaaaatcccttataaatcaaaagaatagaccgagatagggttgagtgttgttccagtttggaacaagagtccactattaaagaacgtggactccaacgtcaaagggcgaaaaaccgtctatcagggcgatggcccactacgtgaaccatcaccctaatcaagttttttggggtcgaggtgccgtaaagcactaaatcggaaccctaaagggagcccccgatttagagcttgacggggaaagccggcgaacgtggcgagaaaggaagggaagaaagcgaaaggagcgggcgctagggcgctggcaagtgtagcggtcacgctgcgcgtaaccaccacacccgccgcgcttaatgcgccgctacagggcgcgtcaggtg

SEQ ID NO: 3163 - DNA, 4964 bp, Artificial Sequence
  Synthetic Construct, AT-6 intein modified protein encoding nucleic acids in pBluescript
gcacttttcggggaaatgtgcgcggaacccctatttgtttatttttctaaatacattcaaatatgtatccgctcatgagacaataaccctgataaatgcttcaataatattgaaaaaggaagagtatgagtattcaacatttccgtgtcgcccttattcccttttttgcggcattttgccttcctgtttttgctcacccagaaacgctggtgaaagtaaaagatgctgaagatcagttgggtgcacgagtgggttacatcgaactggatctcaacagcggtaagatccttgagagttttcgccccgaagaacgttttccaatgatgagcacttttaaagttctgctatgtggcgcggtattatcccgtattgacgccgggcaagagcaactcggtcgccgcatacactattctcagaatgacttggttgagtactcaccagtcacagaaaagcatcttacggatggcatgacagtaagagaattatgcagtgctgccataaccatgagtgataacactgcggccaacttacttctgacaacgatcggaggaccgaaggagctaaccgcttttttgcacaacatgggggatcatgtaactcgccttgatcgttgggaaccggagctgaatgaagccataccaaacgacgagcgtgacaccacgatgcctgtagcaatggcaacaacgttgcgcaaactattaactggcgaactacttactctagcttcccggcaacaattaatagactggatggaggcggataaagttgcaggaccacttctgcgctcggcccttccggctggctggtttattgctgataaatctggagccggtgagcgtgggtctcgcggtatcattgcagcactggggccagatggtaagccctcccgtatcgtagttatctacacgacggggagtcaggcaactatggatgaacgaaatagacagatcgctgagataggtgcctcactgattaagcattggtaactgtcagaccaagtttactcatatatactttagattgatttaaaacttcatttttaatttaaaaggatctaggtgaagatcctttttgataatctcatgaccaaaatcccttaacgtgagttttcgttccactgagcgtcagaccccgtagaaaagatcaaaggatcttcttgagatcctttttttctgcgcgtaatctgctgcttgcaaacaaaaaaaccaccgctaccagcggtggtttgtttgccggatcaagagctaccaactctttttccgaaggtaactggcttcagcagagcgcagataccaaatactgtccttctagtgtagccgtagttaggccaccacttcaagaactctgtagcaccgcctacatacctcgctctgctaatcctgttaccagtggctgctgccagtggcgataagtcgtgtcttaccgggttggactcaagacgatagttaccggataaggcgcagcggtcgggctgaacggggggttcgtgcacacagcccagcttggagcgaacgacctacaccgaactgagatacctacagcgtgagctatgagaaagcgccacgcttcccgaagggagaaaggcggacaggtatccggtaagcggcagggtcggaacaggagagcgcacgagggagcttccagggggaaacgcctggtatctttatagtcctgtcgggtttcgccacctctgacttgagcgtcgatttttgtgatgctcgtcaggggggcggagcctatggaaaaacgccagcaacgcggcctttttacggttcctggccttttgctggccttttgctcacatgttctttcctgcgttatcccctgattctgtggataaccgtattaccgcctttgagtgagctgataccgctcgccgcagccgaacgaccgagcgcagcgagtcagtgagcgaggaagcggaagagcgcccaatacgcaaaccgcctctccccgcgcgttggccgattcattaatgcagctggcacgacaggtttcccgactggaaagcgggcagtgagcgcaacgcaattaatgtgagttagctcactcattaggcaccccaggctttacactttatgcttccggctcgtatgttgtgtggaattgtgagcggataacaatttcacacaggaaacagcatatgcaaacaagcattactctgacatccaacgcatccggtacgtttgacggttactattacgaactctggaaggatactggcaatacaacaatgacggtctacactcaaggtcgcttttcctgccagtggtcgaacatcaataacgcgttgtttaggaccgggaagaaatacaaccagaattggcagtctcttggcacaatccggatcacgtactctgcgacttacaacccaaacgggaactcctacttgtgtatctatggctggtctaccaacccattggtcgagttctacatcgttgagtcctgggggaactggagaccgcctggtgcctgcttcgctcctgagacactcgtgcataccgctgatgggcctcggcctattcgggatctccagcagggggatctcgttctgggcatcagcggccgctacagggaggttacccacaagttcgtgtacaaccagacggacgctatgctcgccatccgcgtcaagcacgccgttgagccaattgaggttacagctggccatcctttctacgccatcaggggcgtgccactggagcagtcgggggagcgcaccctcaggcagctggagtccggcaagcggagcccagagtggatcgacgctggcgagctggagaggggggattacatggcccaggtcatcccatctgaggtggtccctgtcgcgggcttcgacgaggacgatgctcgcctctacgggatcctcctgggcgatgggcatctcagcaagaatggcctgcagtggggcgtctcggggcacccacagagggacgggcacatggatttcgttagggcgtacctgtccgctcggggcatccacttctgggagaccgcgagggacgagacgtacgggcagattcattgggctagcggcaggggggtccgcagggatgctaccacgggcaggatcacaggcgctggggctgcgactctccctttcgagcacgccgacctgtacgatgagcagggccggaagcgcatcgctaggcgcttctcacatctcccaaggcagcagtccctcgctctgatcaggtcgctcctggagtctgacggcggggtgtctcgcggcaaggagatctacttcacaaacacttcaaggcccctcattgagggcctgaggtaccagctcctgaggctgggcgtgccaaccgctgggcagtacagggagaggaggcaggaccacgtcggccagagggctgatgggtcgccaatcaggttcgagggcgtgtgcaaggcgtacgacctcaggattccggctgttccagaggtggctcagctggtcggctgccagccaatcgccaagcggaattggattacgtggcagggctgcgtctactccaggatccgggatgttcagccgattgcggtgaagcccttcgtcttcgatctcaaggtggagggggatgagagctacatgactacttccgggctcgctcacaacacgtccctgggccaagtgacaatcgatggcgggacctacgacatctataggacgacacgcgtcaaccagccttccattgtggggacagccacgttcgatcagtactggagcgtgcgcacctctaagcggacttcaggaacagtgaccgtgaccgatcacttccgcgcctgggcgaaccggggcctgaacctcggcacaatagaccaaattacattgtgcgtggagggttaccaaagctctggatcagccaacatcacccagaacaccttctctcagggctcttcttccggcagttcgggtggctcatccggctccacaacgactactcgcatcgagtgtgagaacatgtccttgtccggaccctacgttagcaggatcaccaatccctttaatggtattgcgctgtacgccaacggagacacagcccgcgctaccgttaacttccccgcaagtcgcaactacaatttccgcctgcggggttgcggcaacaacaataatcttgcccgtgtggacctgaggatcgacggacggaccgtcgggaccttttattaccagggcacatacccctgggaggccccaattgacaatgtttatgtcagtgcggggagtcatacagtcgaaatcactgttactgcggataacggcacatgggacgtgtatgccgactacctggtgatacagtgactcgagggggggcccggtacccaattcgccctatagtgagtcgtattacaattcactggccgtcgttttacaacgtcgtgactgggaaaaccctggcgttacccaacttaatcgccttgcagcacatccccctttcgccagctggcgtaatagcgaagaggcccgcaccgatcgcccttcccaacagttgcgcagcctgaatggcgaatggaaattgtaagcgttaatattttgttaaaattcgcgttaaatttttgttaaatcagctcattttttaaccaataggccgaaatcggcaaaatcccttataaatcaaaagaatagaccgagatagggttgagtgttgttccagtttggaacaagagtccactattaaagaacgtggactccaacgtcaaagggcgaaaaaccgtctatcagggcgatggcccactacgtgaaccatcaccctaatcaagttttttggggtcgaggtgccgtaaagcactaaatcggaaccctaaagggagcccccgatttagagcttgacggggaaagccggcgaacgtggcgagaaaggaagggaagaaagcgaaaggagcgggcgctagggcgctggcaagtgtagcggtcacgctgcgcgtaaccaccacacccgccgcgcttaatgcgccgctacagggcgcgtcaggtg

SEQ ID NO: 3164 - DNA, 5294 bp, Artificial Sequence
  Synthetic Construct, AT-7 intein modified protein encoding nucleic acids in pBluescript
gcacttttcggggaaatgtgcgcggaacccctatttgtttatttttctaaatacattcaaatatgtatccgctcatgagacaataaccctgataaatgcttcaataatattgaaaaaggaagagtatgagtattcaacatttccgtgtcgcccttattcccttttttgcggcattttgccttcctgtttttgctcacccagaaacgctggtgaaagtaaaagatgctgaagatcagttgggtgcacgagtgggttacatcgaactggatctcaacagcggtaagatccttgagagttttcgccccgaagaacgttttccaatgatgagcacttttaaagttctgctatgtggcgcggtattatcccgtattgacgccgggcaagagcaactcggtcgccgcatacactattctcagaatgacttggttgagtactcaccagtcacagaaaagcatcttacggatggcatgacagtaagagaattatgcagtgctgccataaccatgagtgataacactgcggccaacttacttctgacaacgatcggaggaccgaaggagctaaccgcttttttgcacaacatgggggatcatgtaactcgccttgatcgttgggaaccggagctgaatgaagccataccaaacgacgagcgtgacaccacgatgcctgtagcaatggcaacaacgttgcgcaaactattaactggcgaactacttactctagcttcccggcaacaattaatagactggatggaggcggataaagttgcaggaccacttctgcgctcggcccttccggctggctggtttattgctgataaatctggagccggtgagcgtgggtctcgcggtatcattgcagcactggggccagatggtaagccctcccgtatcgtagttatctacacgacggggagtcaggcaactatggatgaacgaaatagacagatcgctgagataggtgcctcactgattaagcattggtaactgtcagaccaagtttactcatatatactttagattgatttaaaacttcatttttaatttaaaaggatctaggtgaagatcctttttgataatctcatgaccaaaatcccttaacgtgagttttcgttccactgagcgtcagaccccgtagaaaagatcaaaggatcttcttgagatcctttttttctgcgcgtaatctgctgcttgcaaacaaaaaaaccaccgctaccagcggtggtttgtttgccggatcaagagctaccaactctttttccgaaggtaactggcttcagcagagcgcagataccaaatactgtccttctagtgtagccgtagttaggccaccacttcaagaactctgtagcaccgcctacatacctcgctctgctaatcctgttaccagtggctgctgccagtggcgataagtcgtgtcttaccgggttggactcaagacgatagttaccggataaggcgcagcggtcgggctgaacggggggttcgtgcacacagcccagcttggagcgaacgacctacaccgaactgagatacctacagcgtgagctatgagaaagcgccacgcttcccgaagggagaaaggcggacaggtatccggtaagcggcagggtcggaacaggagagcgcacgagggagcttccagggggaaacgcctggtatctttatagtcctgtcgggtttcgccacctctgacttgagcgtcgatttttgtgatgctcgtcaggggggcggagcctatggaaaaacgccagcaacgcggcctttttacggttcctggccttttgctggccttttgctcacatgttctttcctgcgttatcccctgattctgtggataaccgtattaccgcctttgagtgagctgataccgctcgccgcagccgaacgaccgagcgcagcgagtcagtgagcgaggaagcggaagagcgcccaatacgcaaaccgcctctccccgcgcgttggccgattcattaatgcagctggcacgacaggtttcccgactggaaagcgggcagtgagcgcaacgcaattaatgtgagttagctcactcattaggcaccccaggctttacactttatgcttccggctcgtatgttgtgtggaattgtgagcggataacaatttcacacaggaaacagcatatgcaaacaagcattactctgacatccaacgcatccggtacgtttgacggttactattacgaactctggaaggatactggcaatacaacaatgacggtctacactcaaggtcgcttttcctgccagtggtcgaacatcaataacgcgttgtttaggaccgggaagaaatacaaccagaattggcagtctcttggcacaatccggatcacgtactctgcgacttacaacccaaacgggaactcctacttgtgtatctatggctggtctaccaacccattggtcgagttctacatcgttgagtcctgggggaactggagaccgcctggtgcctgcctctcgggggatactgaggtcgttctcgggaatggcatggacgtggttctgctgacggatctcgtggacggggcgtgcgtttcgacaatcgagccaaggactggcgtggtcagcccatcgctcatcgaccattacttcgccaaggatgcgacccgcgtcctcaagatcacgctggacgatggcagggttattaaggctgacccagagcaccctctgttcgctgctaaggtggatgagaccacgcgcggcctcaccgggcagtggctgagggtggaggagctcacggtcggccaccatgctctcctggtgtcgccacagcaggcttactgcacctctgagcagtggacactcactctgtcagagaaggaggtctgcaccgcttccacggctcagctcgctaagcagctgtccgagatcggcctggtcggggttccgattcccctctctaaggtgaagtcagctgccaggctgttcggcctcgtcctgtccgctggcgacttcagcgggaagctctacgtggagaaggacgaggatgttacagccgtgaacagcgacctcactgcgctgggcttctcgccagctcactgggtccggtaccaggacgatcagcagaagtggttcaagtgcgacgattcgaacggcaaggcgatctgcattaccctggtccctacggctaatgctctcctgcagaccctcggggctcacgacgctgagaagcagcatcggtactgcctcctgccaaagtggctcctggatgcccctacgtccatcaagagggagttcctcggcgctctgttcggcgggaacggggcccacatcacaatttcgtgcaatgagggcaagtgggagccgactatgtctgcgctcacacagcacactgacgctgatcatctggagagcacagttgtgtacctcaagcaggttgccactctcctgggcatgctgaacatctgctccagcgtgtcgtctgagaagcacattacagccgagaagactgggtacgcggtccacctgcatgttgacaacacggcggagaatctcgttcggttctacgagcaagtgggctaccgctactgcttcaataagacatcccagtcatccgcccccgtgcagtggatcaaggggtctctgttcttcattgagcagcaccgctcaaagtgccagcatgctttcgagctcctgcacaccggcctcgggacgaaggctgctgtctccgccgagatcaacatgccacaccataatcctagccacatgctgaacgttaaggagatcccgaccgctcccgccgacgagtacatcacgtggattgagttcaaggatcgctacgtgcataaggagtccccgcggttcgtgtgggtcaccatccacagcattgaggaggcgcccgctgagaggctctacgacttcaatacggtttcgcagaatcatagcttcttcgccaacagcatcgtctctcataatacgtccctgggccaagtgacaatcgatggcgggacctacgacatctataggacgacacgcgtcaaccagccttccattgtggggacagccacgttcgatcagtactggagcgtgcgcacctctaagcggacttcaggaacagtgaccgtgaccgatcacttccgcgcctgggcgaaccggggcctgaacctcggcacaatagaccaaattacattgtgcgtggagggttaccaaagctctggatcagccaacatcacccagaacaccttctctcagggctcttcttccggcagttcgggtggctcatccggctccacaacgactactcgcatcgagtgtgagaacatgtccttgtccggaccctacgttagcaggatcaccaatccctttaatggtattgcgctgtacgccaacggagacacagcccgcgctaccgttaacttccccgcaagtcgcaactacaatttccgcctgcggggttgcggcaacaacaataatcttgcccgtgtggacctgaggatcgacggacggaccgtcgggaccttttattaccagggcacatacccctgggaggccccaattgacaatgtttatgtcagtgcggggagtcatacagtcgaaatcactgttactgcggataacggcacatgggacgtgtatgccgactacctggtgatacagtgactcgagggggggcccggtacccaattcgccctatagtgagtcgtattacaattcactggccgtcgttttacaacgtcgtgactgggaaaaccctggcgttacccaacttaatcgccttgcagcacatccccctttcgccagctggcgtaatagcgaagaggcccgcaccgatcgcccttcccaacagttgcgcagcctgaatggcgaatggaaattgtaagcgttaatattttgttaaaattcgcgttaaatttttgttaaatcagctcattttttaaccaataggccgaaatcggcaaaatcccttataaatcaaaagaatagaccgagatagggttgagtgttgttccagtttggaacaagagtccactattaaagaacgtggactccaacgtcaaagggcgaaaaaccgtctatcagggcgatggcccactacgtgaaccatcaccctaatcaagttttttggggtcgaggtgccgtaaagcactaaatcggaaccctaaagggagcccccgatttagagcttgacggggaaagccggcgaacgtggcgagaaaggaagggaagaaagcgaaaggagcgggcgctagggcgctggcaagtgtagcggtcacgctgcgcgtaaccaccacacccgccgcgcttaatgcgccgctacagggcgcgtcaggtg

SEQ ID NO: 3165 - DNA, 5087 bp, Artificial Sequence
  Synthetic Construct, AT-8 intein modified protein encoding nucleic acids in pBluescript
gcacttttcggggaaatgtgcgcggaacccctatttgtttatttttctaaatacattcaaatatgtatccgctcatgagacaataaccctgataaatgcttcaataatattgaaaaaggaagagtatgagtattcaacatttccgtgtcgcccttattcccttttttgcggcattttgccttcctgtttttgctcacccagaaacgctggtgaaagtaaaagatgctgaagatcagttgggtgcacgagtgggttacatcgaactggatctcaacagcggtaagatccttgagagttttcgccccgaagaacgttttccaatgatgagcacttttaaagttctgctatgtggcgcggtattatcccgtattgacgccgggcaagagcaactcggtcgccgcatacactattctcagaatgacttggttgagtactcaccagtcacagaaaagcatcttacggatggcatgacagtaagagaattatgcagtgctgccataaccatgagtgataacactgcggccaacttacttctgacaacgatcggaggaccgaaggagctaaccgcttttttgcacaacatgggggatcatgtaactcgccttgatcgttgggaaccggagctgaatgaagccataccaaacgacgagcgtgacaccacgatgcctgtagcaatggcaacaacgttgcgcaaactattaactggcgaactacttactctagcttcccggcaacaattaatagactggatggaggcggataaagttgcaggaccacttctgcgctcggcccttccggctggctggtttattgctgataaatctggagccggtgagcgtgggtctcgcggtatcattgcagcactggggccagatggtaagccctcccgtatcgtagttatctacacgacggggagtcaggcaactatggatgaacgaaatagacagatcgctgagataggtgcctcactgattaagcattggtaactgtcagaccaagtttactcatatatactttagattgatttaaaacttcatttttaatttaaaaggatctaggtgaagatcctttttgataatctcatgaccaaaatcccttaacgtgagttttcgttccactgagcgtcagaccccgtagaaaagatcaaaggatcttcttgagatcctttttttctgcgcgtaatctgctgcttgcaaacaaaaaaaccaccgctaccagcggtggtttgtttgccggatcaagagctaccaactctttttccgaaggtaactggcttcagcagagcgcagataccaaatactgtccttctagtgtagccgtagttaggccaccacttcaagaactctgtagcaccgcctacatacctcgctctgctaatcctgttaccagtggctgctgccagtggcgataagtcgtgtcttaccgggttggactcaagacgatagttaccggataaggcgcagcggtcgggctgaacggggggttcgtgcacacagcccagcttggagcgaacgacctacaccgaactgagatacctacagcgtgagctatgagaaagcgccacgcttcccgaagggagaaaggcggacaggtatccggtaagcggcagggtcggaacaggagagcgcacgagggagcttccagggggaaacgcctggtatctttatagtcctgtcgggtttcgccacctctgacttgagcgtcgatttttgtgatgctcgtcaggggggcggagcctatggaaaaacgccagcaacgcggcctttttacggttcctggccttttgctggccttttgctcacatgttctttcctgcgttatcccctgattctgtggataaccgtattaccgcctttgagtgagctgataccgctcgccgcagccgaacgaccgagcgcagcgagtcagtgagcgaggaagcggaagagcgcccaatacgcaaaccgcctctccccgcgcgttggccgattcattaatgcagctggcacgacaggtttcccgactggaaagcgggcagtgagcgcaacgcaattaatgtgagttagctcactcattaggcaccccaggctttacactttatgcttccggctcgtatgttgtgtggaattgtgagcggataacaatttcacacaggaaacagcatatgcaaacaagcattactctgacatccaacgcatccggtacgtttgacggttactattacgaactctggaaggatactggcaatacaacaatgacggtctacactcaaggtcgcttttcctgccagtggtcgaacatcaataacgcgttgtttaggaccgggaagaaatacaaccagaattggcagtctcttggcacaatccggatcacgtactctgcgacttacaacccaaacgggaactcctacttgtgtatctatggctggtctaccaacccattggtcgagttctacatcgttgagtcctgggggaactggagaccgcctggtgcctgcttcgggcgggatacccctctcctcatggcggacggcactactaagttcgttcaggacattaaggctctggatcagctcatgggcgacgattgcacgccgcgcatcgtccaggagaggtctctcgttcacgagtcaggggctctgtacagggtggtccccaagaacgccaatggccacgacgcgttcgtgtgcaacaaggagcatatcctcgtgatggtcaatgttaagcagccgtgggtcagccagacggttatcgacggcgtggatcagttccatgtctcggaggttgtgtgcatcgggaacattccgacagtgcgctccagcggcaatttcgcttctgctgtcgaggctacgaaggctctgccagcttggacactcctgatctgggagattagcgtgctggagtacctggcggtcgacgctgatctcaggcagcacttcatgatctacaagccagctggcgggattgagtacccaaccacgacaaacctggacatcgtgcagcacttcggcgccgagtcggttcccaacctggagcatgccgtgatgtggtgcatcggcctgtggattctcctgggggacgtcgatacagccggcaacccagttctcatcctgagcggcattgaccacctccatcctctgatcaagactctccactcgcattctcagaagctgtcaatttccttcaccaaccagctcgacgagggggtcgctgatatcagcaagccaaccatcattgccctcggcgacaagttcgggctcctgttcaagtccctgggcatcgagagcgctgagtgcattcctgatgccctcctgaggtcgtctaagctccacagggctgctctcctggctggcctggtggaggggagcaacgctttctcgatcgtcaaggacactccaaagcattgggatatttcctgcaagaacaatatgatcttcgagaatattaagaggctctcatccagcctcggcctgtgcgttgacacggtgacaccagcgactatcacccagcaggtgtccgtcaagacgctgcagatccggatttcgggccctcgcatgcactacgtgtctgagctcatcagcaacgactcgctgaagactacctctgtcgtttcaatcgattcctggctgaacgtcaagtcaaatgcctgcgagttcgagatcgagtccattggctgcggggagtacttcggcttcacagttatggggccaaactcaaggttcctcctcggggatttcacagtcacacacaacacgtccctgggccaagtgacaatcgatggcgggacctacgacatctataggacgacacgcgtcaaccagccttccattgtggggacagccacgttcgatcagtactggagcgtgcgcacctctaagcggacttcaggaacagtgaccgtgaccgatcacttccgcgcctgggcgaaccggggcctgaacctcggcacaatagaccaaattacattgtgcgtggagggttaccaaagctctggatcagccaacatcacccagaacaccttctctcagggctcttcttccggcagttcgggtggctcatccggctccacaacgactactcgcatcgagtgtgagaacatgtccttgtccggaccctacgttagcaggatcaccaatccctttaatggtattgcgctgtacgccaacggagacacagcccgcgctaccgttaacttccccgcaagtcgcaactacaatttccgcctgcggggttgcggcaacaacaataatcttgcccgtgtggacctgaggatcgacggacggaccgtcgggaccttttattaccagggcacatacccctgggaggccccaattgacaatgtttatgtcagtgcggggagtcatacagtcgaaatcactgttactgcggataacggcacatgggacgtgtatgccgactacctggtgatacagtgactcgagggggggcccggtacccaattcgccctatagtgagtcgtattacaattcactggccgtcgttttacaacgtcgtgactgggaaaaccctggcgttacccaacttaatcgccttgcagcacatccccctttcgccagctggcgtaatagcgaagaggcccgcaccgatcgcccttcccaacagttgcgcagcctgaatggcgaatggaaattgtaagcgttaatattttgttaaaattcgcgttaaatttttgttaaatcagctcattttttaaccaataggccgaaatcggcaaaatcccttataaatcaaaagaatagaccgagatagggttgagtgttgttccagtttggaacaagagtccactattaaagaacgtggactccaacgtcaaagggcgaaaaaccgtctatcagggcgatggcccactacgtgaaccatcaccctaatcaagttttttggggtcgaggtgccgtaaagcactaaatcggaaccctaaagggagcccccgatttagagcttgacggggaaagccggcgaacgtggcgagaaaggaagggaagaaagcgaaaggagcgggcgctagggcgctggcaagtgtagcggtcacgctgcgcgtaaccaccacacccgccgcgcttaatgcgccgctacagggcgcgtcaggtg

SEQ ID NO: 3166 - DNA, 4985 bp, Artificial Sequence
  Synthetic Construct, AT-9 intein modified protein encoding nucleic acids in pBluescript
gcacttttcggggaaatgtgcgcggaacccctatttgtttatttttctaaatacattcaaatatgtatccgctcatgagacaataaccctgataaatgcttcaataatattgaaaaaggaagagtatgagtattcaacatttccgtgtcgcccttattcccttttttgcggcattttgccttcctgtttttgctcacccagaaacgctggtgaaagtaaaagatgctgaagatcagttgggtgcacgagtgggttacatcgaactggatctcaacagcggtaagatccttgagagttttcgccccgaagaacgttttccaatgatgagcacttttaaagttctgctatgtggcgcggtattatcccgtattgacgccgggcaagagcaactcggtcgccgcatacactattctcagaatgacttggttgagtactcaccagtcacagaaaagcatcttacggatggcatgacagtaagagaattatgcagtgctgccataaccatgagtgataacactgcggccaacttacttctgacaacgatcggaggaccgaaggagctaaccgcttttttgcacaacatgggggatcatgtaactcgccttgatcgttgggaaccggagctgaatgaagccataccaaacgacgagcgtgacaccacgatgcctgtagcaatggcaacaacgttgcgcaaactattaactggcgaactacttactctagcttcccggcaacaattaatagactggatggaggcggataaagttgcaggaccacttctgcgctcggcccttccggctggctggtttattgctgataaatctggagccggtgagcgtgggtctcgcggtatcattgcagcactggggccagatggtaagccctcccgtatcgtagttatctacacgacggggagtcaggcaactatggatgaacgaaatagacagatcgctgagataggtgcctcactgattaagcattggtaactgtcagaccaagtttactcatatatactttagattgatttaaaacttcatttttaatttaaaaggatctaggtgaagatcctttttgataatctcatgaccaaaatcccttaacgtgagttttcgttccactgagcgtcagaccccgtagaaaagatcaaaggatcttcttgagatcctttttttctgcgcgtaatctgctgcttgcaaacaaaaaaaccaccgctaccagcggtggtttgtttgccggatcaagagctaccaactctttttccgaaggtaactggcttcagcagagcgcagataccaaatactgtccttctagtgtagccgtagttaggccaccacttcaagaactctgtagcaccgcctacatacctcgctctgctaatcctgttaccagtggctgctgccagtggcgataagtcgtgtcttaccgggttggactcaagacgatagttaccggataaggcgcagcggtcgggctgaacggggggttcgtgcacacagcccagcttggagcgaacgacctacaccgaactgagatacctacagcgtgagctatgagaaagcgccacgcttcccgaagggagaaaggcggacaggtatccggtaagcggcagggtcggaacaggagagcgcacgagggagcttccagggggaaacgcctggtatctttatagtcctgtcgggtttcgccacctctgacttgagcgtcgatttttgtgatgctcgtcaggggggcggagcctatggaaaaacgccagcaacgcggcctttttacggttcctggccttttgctggccttttgctcacatgttctttcctgcgttatcccctgattctgtggataaccgtattaccgcctttgagtgagctgataccgctcgccgcagccgaacgaccgagcgcagcgagtcagtgagcgaggaagcggaagagcgcccaatacgcaaaccgcctctccccgcgcgttggccgattcattaatgcagctggcacgacaggtttcccgactggaaagcgggcagtgagcgcaacgcaattaatgtgagttagctcactcattaggcaccccaggctttacactttatgcttccggctcgtatgttgtgtggaattgtgagcggataacaatttcacacaggaaacagcatatgcaaacaagcattactctgacatccaacgcatccggtacgtttgacggttactattacgaactctggaaggatactggcaatacaacaatgacggtctacactcaaggtcgcttttcctgccagtggtcgaacatcaataacgcgttgtttaggaccgggaagaaatacaaccagaattggcagtctcttggcacaatccggatcacgtactctgcgacttacaacccaaacgggaactcctacttgtgtatctatggctggtctaccaacccattggtcgagttctacatcgttgagtcctgggggaactggagaccgcctggtgcctgcgttacgggggagacgctgctgctgacggagaatggctacgagaaggccgctgatctctacaagaagcagaacaatctgaaggttgtgatcgacaacaggacaaaggacttcgctgtggatagcaagggcaccacgatcgtcgacgctattccaatgcagctgacgaagaaggatgccgagatcttcaaggtcaagaccaagcagggctacgagattcgcgcgacggagtggcacaagttctacgttaagagggacggcgagatccagaagctgcagctcaaccagctgaagaccggggataagctcctggtccagtccgctgagggcgcttacgggaagatccatgagcccgacctcgcctacattatgggcatcattgcgggcgatgggaccatcacggagaagaccgccaagatctacctctacgacaacaagaaggtgctggagcagaaggttacggatgcggtgcacaggatcattcacaagcataaggtcgaccgggcttacaagcataatacatcactcctgccaactttcaacatggcgaatcctgagaagcaggacctcctgtacatgaactccacagttctgttcgatatcctcaagaagttcggcatgaataaggagcgcaagactagggtcccggagttcattttccaggccaacaaggagacacaggccgcgtacctgagcggcctcttccagactgacgggtgcgtgaacgcgaatcacaaggctaaggccctgaccatcgagctcacgtccattcattacgagagcctgcaggatgttcagaagctcctgctcaatatgggcgtgtacacaactatctactcgaacaataagcggtctcaggagctgctcccagacgggaagggcgggtcgaagctctacaacgtcaagcccacccacaagatctcaattcaggatcgcaactcccgcgagctgttcatgagcatcgtcgagctcaaggactacgatgtttacaagttcaacctgctcacagagactctccagccgaagtcgcgcaagcccaagcacgacttcacggccgagatcatttctatcgaggaggacggcgtggaggatgtctacgatactactcaggaggattaccactctctcatcttcaatggcatcgttacgggcaacacgtccctgggccaagtgacaatcgatggcgggacctacgacatctataggacgacacgcgtcaaccagccttccattgtggggacagccacgttcgatcagtactggagcgtgcgcacctctaagcggacttcaggaacagtgaccgtgaccgatcacttccgcgcctgggcgaaccggggcctgaacctcggcacaatagaccaaattacattgtgcgtggagggttaccaaagctctggatcagccaacatcacccagaacaccttctctcagggctcttcttccggcagttcgggtggctcatccggctccacaacgactactcgcatcgagtgtgagaacatgtccttgtccggaccctacgttagcaggatcaccaatccctttaatggtattgcgctgtacgccaacggagacacagcccgcgctaccgttaacttccccgcaagtcgcaactacaatttccgcctgcggggttgcggcaacaacaataatcttgcccgtgtggacctgaggatcgacggacggaccgtcgggaccttttattaccagggcacatacccctgggaggccccaattgacaatgtttatgtcagtgcggggagtcatacagtcgaaatcactgttactgcggataacggcacatgggacgtgtatgccgactacctggtgatacagtgactcgagggggggcccggtacccaattcgccctatagtgagtcgtattacaattcactggccgtcgttttacaacgtcgtgactgggaaaaccctggcgttacccaacttaatcgccttgcagcacatccccctttcgccagctggcgtaatagcgaagaggcccgcaccgatcgcccttcccaacagttgcgcagcctgaatggcgaatggaaattgtaagcgttaatattttgttaaaattcgcgttaaatttttgttaaatcagctcattttttaaccaataggccgaaatcggcaaaatcccttataaatcaaaagaatagaccgagatagggttgagtgttgttccagtttggaacaagagtccactattaaagaacgtggactccaacgtcaaagggcgaaaaaccgtctatcagggcgatggcccactacgtgaaccatcaccctaatcaagttttttggggtcgaggtgccgtaaagcactaaatcggaaccctaaagggagcccccgatttagagcttgacggggaaagccggcgaacgtggcgagaaaggaagggaagaaagcgaaaggagcgggcgctagggcgctggcaagtgtagcggtcacgctgcgcgtaaccaccacacccgccgcgcttaatgcgccgctacagggcgcgtcaggtg

SEQ ID NO: 3167 - DNA, 4940 bp, Artificial Sequence
  Synthetic Construct, AT-10 intein modified protein encoding nucleic acids in pBluescript
gcacttttcggggaaatgtgcgcggaacccctatttgtttatttttctaaatacattcaaatatgtatccgctcatgagacaataaccctgataaatgcttcaataatattgaaaaaggaagagtatgagtattcaacatttccgtgtcgcccttattcccttttttgcggcattttgccttcctgtttttgctcacccagaaacgctggtgaaagtaaaagatgctgaagatcagttgggtgcacgagtgggttacatcgaactggatctcaacagcggtaagatccttgagagttttcgccccgaagaacgttttccaatgatgagcacttttaaagttctgctatgtggcgcggtattatcccgtattgacgccgggcaagagcaactcggtcgccgcatacactattctcagaatgacttggttgagtactcaccagtcacagaaaagcatcttacggatggcatgacagtaagagaattatgcagtgctgccataaccatgagtgataacactgcggccaacttacttctgacaacgatcggaggaccgaaggagctaaccgcttttttgcacaacatgggggatcatgtaactcgccttgatcgttgggaaccggagctgaatgaagccataccaaacgacgagcgtgacaccacgatgcctgtagcaatggcaacaacgttgcgcaaactattaactggcgaactacttactctagcttcccggcaacaattaatagactggatggaggcggataaagttgcaggaccacttctgcgctcggcccttccggctggctggtttattgctgataaatctggagccggtgagcgtgggtctcgcggtatcattgcagcactggggccagatggtaagccctcccgtatcgtagttatctacacgacggggagtcaggcaactatggatgaacgaaatagacagatcgctgagataggtgcctcactgattaagcattggtaactgtcagaccaagtttactcatatatactttagattgatttaaaacttcatttttaatttaaaaggatctaggtgaagatcctttttgataatctcatgaccaaaatcccttaacgtgagttttcgttccactgagcgtcagaccccgtagaaaagatcaaaggatcttcttgagatcctttttttctgcgcgtaatctgctgcttgcaaacaaaaaaaccaccgctaccagcggtggtttgtttgccggatcaagagctaccaactctttttccgaaggtaactggcttcagcagagcgcagataccaaatactgtccttctagtgtagccgtagttaggccaccacttcaagaactctgtagcaccgcctacatacctcgctctgctaatcctgttaccagtggctgctgccagtggcgataagtcgtgtcttaccgggttggactcaagacgatagttaccggataaggcgcagcggtcgggctgaacggggggttcgtgcacacagcccagcttggagcgaacgacctacaccgaactgagatacctacagcgtgagctatgagaaagcgccacgcttcccgaagggagaaaggcggacaggtatccggtaagcggcagggtcggaacaggagagcgcacgagggagcttccagggggaaacgcctggtatctttatagtcctgtcgggtttcgccacctctgacttgagcgtcgatttttgtgatgctcgtcaggggggcggagcctatggaaaaacgccagcaacgcggcctttttacggttcctggccttttgctggccttttgctcacatgttctttcctgcgttatcccctgattctgtggataaccgtattaccgcctttgagtgagctgataccgctcgccgcagccgaacgaccgagcgcagcgagtcagtgagcgaggaagcggaagagcgcccaatacgcaaaccgcctctccccgcgcgttggccgattcattaatgcagctggcacgacaggtttcccgactggaaagcgggcagtgagcgcaacgcaattaatgtgagttagctcactcattaggcaccccaggctttacactttatgcttccggctcgtatgttgtgtggaattgtgagcggataacaatttcacacaggaaacagcatatgcaaacaagcattactctgacatccaacgcatccggtacgtttgacggttactattacgaactctggaaggatactggcaatacaacaatgacggtctacactcaaggtcgcttttcctgccagtggtcgaacatcaataacgcgttgtttaggaccgggaagaaatacaaccagaattggcagtctcttggcacaatccggatcacgtactctgcgacttacaacccaaacgggaactcctacttgtgtatctatggctggtctaccaacccattggtcgagttctacatcgttgagtcctgggggaactggagaccgcctggtgcctgcgttaccgctgacacactcatcgctactgacagggggctggagaggatcggcaacatcgtgggggagtctaggggcatcaagtctattgacggcaagctccactgggtcgagaacatcttcccgacagggactaagcccgtttaccagctgaggaccaagtctggctaccagctgaagctcaccggggatcatgtggtcttcacggagaataggggcgacgtcaaggcttgcgagctgaggaaggacgatatggtccggctcgttggcgctccattcgggaaggagaccacgggctccacagatatcgcccagctcattgggctcctgactggcgacgggtgcatcacaactgccaacgagattgctgcttcgggcgagcagaggaggaccgcgttcctgacggtttctaaggctgagcaggagattgcggagtgggctaaccagttcatcaatacgctgaggccggagctcggcgagcacaataagtcggggtctgtgaccgagacggccaccacggcgcgggttgctgtgggctccccacgcatcctcaagcagttcgaggcgttcgctgttctggataagggcagcgtgcataagctcttcacagacaaggtgttccagctggctcagtcggagcaggctgctctcctgaggggcctgttcacagctgacgggactgtcgccaactactccgataagtcccagtacatcgctctggacgctacgagcctggagctcctgcagcaggtccagctcctgctcttcaacttcggcatcaagtccaagatctacgagaataggagggtgggcgagctcgtctccctgctcccagacgggaagggcgggatcaaggagtaccctgtgcagcagatgcacagcctcaggatctcgcggtccagccgcattctgttcgagcagcagatcggcttcatggccgagtcgaagaagtacgaggccctggcggagctcaaccgcacagtgtccacttacagggacagcgcgtacgatgctgtcgcctctctgacctactcaggcgaggaggccgttttcgatctcacggagccggagacggatcatttcattgctaatggcattggggttcataatacgtccctgggccaagtgacaatcgatggcgggacctacgacatctataggacgacacgcgtcaaccagccttccattgtggggacagccacgttcgatcagtactggagcgtgcgcacctctaagcggacttcaggaacagtgaccgtgaccgatcacttccgcgcctgggcgaaccggggcctgaacctcggcacaatagaccaaattacattgtgcgtggagggttaccaaagctctggatcagccaacatcacccagaacaccttctctcagggctcttcttccggcagttcgggtggctcatccggctccacaacgactactcgcatcgagtgtgagaacatgtccttgtccggaccctacgttagcaggatcaccaatccctttaatggtattgcgctgtacgccaacggagacacagcccgcgctaccgttaacttccccgcaagtcgcaactacaatttccgcctgcggggttgcggcaacaacaataatcttgcccgtgtggacctgaggatcgacggacggaccgtcgggaccttttattaccagggcacatacccctgggaggccccaattgacaatgtttatgtcagtgcggggagtcatacagtcgaaatcactgttactgcggataacggcacatgggacgtgtatgccgactacctggtgatacagtgactcgagggggggcccggtacccaattcgccctatagtgagtcgtattacaattcactggccgtcgttttacaacgtcgtgactgggaaaaccctggcgttacccaacttaatcgccttgcagcacatccccctttcgccagctggcgtaatagcgaagaggcccgcaccgatcgcccttcccaacagttgcgcagcctgaatggcgaatggaaattgtaagcgttaatattttgttaaaattcgcgttaaatttttgttaaatcagctcattttttaaccaataggccgaaatcggcaaaatcccttataaatcaaaagaatagaccgagatagggttgagtgttgttccagtttggaacaagagtccactattaaagaacgtggactccaacgtcaaagggcgaaaaaccgtctatcagggcgatggcccactacgtgaaccatcaccctaatcaagttttttggggtcgaggtgccgtaaagcactaaatcggaaccctaaagggagcccccgatttagagcttgacggggaaagccggcgaacgtggcgagaaaggaagggaagaaagcgaaaggagcgggcgctagggcgctggcaagtgtagcggtcacgctgcgcgtaaccaccacacccgccgcgcttaatgcgccgctacagggcgcgtcaggtg

SEQ ID NO: 3168 - DNA, 4658 bp, Artificial Sequence
  Synthetic Construct, AT-11 intein modified protein encoding nucleic acids in pBluescript
gcacttttcggggaaatgtgcgcggaacccctatttgtttatttttctaaatacattcaaatatgtatccgctcatgagacaataaccctgataaatgcttcaataatattgaaaaaggaagagtatgagtattcaacatttccgtgtcgcccttattcccttttttgcggcattttgccttcctgtttttgctcacccagaaacgctggtgaaagtaaaagatgctgaagatcagttgggtgcacgagtgggttacatcgaactggatctcaacagcggtaagatccttgagagttttcgccccgaagaacgttttccaatgatgagcacttttaaagttctgctatgtggcgcggtattatcccgtattgacgccgggcaagagcaactcggtcgccgcatacactattctcagaatgacttggttgagtactcaccagtcacagaaaagcatcttacggatggcatgacagtaagagaattatgcagtgctgccataaccatgagtgataacactgcggccaacttacttctgacaacgatcggaggaccgaaggagctaaccgcttttttgcacaacatgggggatcatgtaactcgccttgatcgttgggaaccggagctgaatgaagccataccaaacgacgagcgtgacaccacgatgcctgtagcaatggcaacaacgttgcgcaaactattaactggcgaactacttactctagcttcccggcaacaattaatagactggatggaggcggataaagttgcaggaccacttctgcgctcggcccttccggctggctggtttattgctgataaatctggagccggtgagcgtgggtctcgcggtatcattgcagcactggggccagatggtaagccctcccgtatcgtagttatctacacgacggggagtcaggcaactatggatgaacgaaatagacagatcgctgagataggtgcctcactgattaagcattggtaactgtcagaccaagtttactcatatatactttagattgatttaaaacttcatttttaatttaaaaggatctaggtgaagatcctttttgataatctcatgaccaaaatcccttaacgtgagttttcgttccactgagcgtcagaccccgtagaaaagatcaaaggatcttcttgagatcctttttttctgcgcgtaatctgctgcttgcaaacaaaaaaaccaccgctaccagcggtggtttgtttgccggatcaagagctaccaactctttttccgaaggtaactggcttcagcagagcgcagataccaaatactgtccttctagtgtagccgtagttaggccaccacttcaagaactctgtagcaccgcctacatacctcgctctgctaatcctgttaccagtggctgctgccagtggcgataagtcgtgtcttaccgggttggactcaagacgatagttaccggataaggcgcagcggtcgggctgaacggggggttcgtgcacacagcccagcttggagcgaacgacctacaccgaactgagatacctacagcgtgagctatgagaaagcgccacgcttcccgaagggagaaaggcggacaggtatccggtaagcggcagggtcggaacaggagagcgcacgagggagcttccagggggaaacgcctggtatctttatagtcctgtcgggtttcgccacctctgacttgagcgtcgatttttgtgatgctcgtcaggggggcggagcctatggaaaaacgccagcaacgcggcctttttacggttcctggccttttgctggccttttgctcacatgttctttcctgcgttatcccctgattctgtggataaccgtattaccgcctttgagtgagctgataccgctcgccgcagccgaacgaccgagcgcagcgagtcagtgagcgaggaagcggaagagcgcccaatacgcaaaccgcctctccccgcgcgttggccgattcattaatgcagctggcacgacaggtttcccgactggaaagcgggcagtgagcgcaacgcaattaatgtgagttagctcactcattaggcaccccaggctttacactttatgcttccggctcgtatgttgtgtggaattgtgagcggataacaatttcacacaggaaacagcatatgcaaacaagcattactctgacatccaacgcatccggtacgtttgacggttactattacgaactctggaaggatactggcaatacaacaatgacggtctacactcaaggtcgcttttcctgccagtggtcgaacatcaataacgcgttgtttaggaccgggaagaaatacaaccagaattggcagtctcttggcacaatccggatcacgtactctgcgacttacaacccaaacgggaactcctacttgtgtatctatggctggtctaccaacccattggtcgagttctacatcgttgagtcctgggggaactggagaccgcctggtgcctgcctccatggggattcgctcatcgtgacagatcatgggctcgttcctatgcgggaggtcgtgaatcatcgccagcggctgcaggtctcagacggcgagaggcagcagacagtgtacgactggaaccggttcgccgattacccaaccgtcacgatgaggaccagggcgggcttcacactgactgggtcccacaatcatcgcatcatgctcgctgacggcacctggaggaggctggacgagctccagatcggggatcgggtgcgcattgctggcgggaccgagctgtgggctacggagccagctctcctgaggtgcaggaggccgctgcccagggtcctcgttaccgctggcgccccggccgcgaccacgtccagcccccacaggcgggggtacaggagggctgctgctgtggtcgttgacgagaagctcgctgctgctatcggcaggcgctgcgttacgcatgctgaccagcaggccctggatgcgattaggaggtcgccaaggcctcaggtggtcgcgttcctccgcgctttctgccagggcgctgggcagtcggtcgcttctggcctgaccctcacgtgcgctgacgctgatctggccacaactgtgcagctcctgctcacaaacctgggcgtcctcgcgcacaggactgacaccacggttcggattgataatggcgacgatctggagagggcttacacaactctcgccacaccgactggctggaccgacgaggttgtggcgctggagcatgggacggctgatgtctacgacatttctgttactgctactcatcgctacgctgctcagggcttcatcaaccacaacacgtccctgggccaagtgacaatcgatggcgggacctacgacatctataggacgacacgcgtcaaccagccttccattgtggggacagccacgttcgatcagtactggagcgtgcgcacctctaagcggacttcaggaacagtgaccgtgaccgatcacttccgcgcctgggcgaaccggggcctgaacctcggcacaatagaccaaattacattgtgcgtggagggttaccaaagctctggatcagccaacatcacccagaacaccttctctcagggctcttcttccggcagttcgggtggctcatccggctccacaacgactactcgcatcgagtgtgagaacatgtccttgtccggaccctacgttagcaggatcaccaatccctttaatggtattgcgctgtacgccaacggagacacagcccgcgctaccgttaacttccccgcaagtcgcaactacaatttccgcctgcggggttgcggcaacaacaataatcttgcccgtgtggacctgaggatcgacggacggaccgtcgggaccttttattaccagggcacatacccctgggaggccccaattgacaatgtttatgtcagtgcggggagtcatacagtcgaaatcactgttactgcggataacggcacatgggacgtgtatgccgactacctggtgatacagtgactcgagggggggcccggtacccaattcgccctatagtgagtcgtattacaattcactggccgtcgttttacaacgtcgtgactgggaaaaccctggcgttacccaacttaatcgccttgcagcacatccccctttcgccagctggcgtaatagcgaagaggcccgcaccgatcgcccttcccaacagttgcgcagcctgaatggcgaatggaaattgtaagcgttaatattttgttaaaattcgcgttaaatttttgttaaatcagctcattttttaaccaataggccgaaatcggcaaaatcccttataaatcaaaagaatagaccgagatagggttgagtgttgttccagtttggaacaagagtccactattaaagaacgtggactccaacgtcaaagggcgaaaaaccgtctatcagggcgatggcccactacgtgaaccatcaccctaatcaagttttttggggtcgaggtgccgtaaagcactaaatcggaaccctaaagggagcccccgatttagagcttgacggggaaagccggcgaacgtggcgagaaaggaagggaagaaagcgaaaggagcgggcgctagggcgctggcaagtgtagcggtcacgctgcgcgtaaccaccacacccgccgcgcttaatgcgccgctacagggcgcgtcaggtg

SEQ ID NO: 3169 - DNA, 4268 bp, Artificial Sequence
  Synthetic Construct, AT-12 intein modified protein encoding nucleic acids in pBluescript
gcacttttcggggaaatgtgcgcggaacccctatttgtttatttttctaaatacattcaaatatgtatccgctcatgagacaataaccctgataaatgcttcaataatattgaaaaaggaagagtatgagtattcaacatttccgtgtcgcccttattcccttttttgcggcattttgccttcctgtttttgctcacccagaaacgctggtgaaagtaaaagatgctgaagatcagttgggtgcacgagtgggttacatcgaactggatctcaacagcggtaagatccttgagagttttcgccccgaagaacgttttccaatgatgagcacttttaaagttctgctatgtggcgcggtattatcccgtattgacgccgggcaagagcaactcggtcgccgcatacactattctcagaatgacttggttgagtactcaccagtcacagaaaagcatcttacggatggcatgacagtaagagaattatgcagtgctgccataaccatgagtgataacactgcggccaacttacttctgacaacgatcggaggaccgaaggagctaaccgcttttttgcacaacatgggggatcatgtaactcgccttgatcgttgggaaccggagctgaatgaagccataccaaacgacgagcgtgacaccacgatgcctgtagcaatggcaacaacgttgcgcaaactattaactggcgaactacttactctagcttcccggcaacaattaatagactggatggaggcggataaagttgcaggaccacttctgcgctcggcccttccggctggctggtttattgctgataaatctggagccggtgagcgtgggtctcgcggtatcattgcagcactggggccagatggtaagccctcccgtatcgtagttatctacacgacggggagtcaggcaactatggatgaacgaaatagacagatcgctgagataggtgcctcactgattaagcattggtaactgtcagaccaagtttactcatatatactttagattgatttaaaacttcatttttaatttaaaaggatctaggtgaagatcctttttgataatctcatgaccaaaatcccttaacgtgagttttcgttccactgagcgtcagaccccgtagaaaagatcaaaggatcttcttgagatcctttttttctgcgcgtaatctgctgcttgcaaacaaaaaaaccaccgctaccagcggtggtttgtttgccggatcaagagctaccaactctttttccgaaggtaactggcttcagcagagcgcagataccaaatactgtccttctagtgtagccgtagttaggccaccacttcaagaactctgtagcaccgcctacatacctcgctctgctaatcctgttaccagtggctgctgccagtggcgataagtcgtgtcttaccgggttggactcaagacgatagttaccggataaggcgcagcggtcgggctgaacggggggttcgtgcacacagcccagcttggagcgaacgacctacaccgaactgagatacctacagcgtgagctatgagaaagcgccacgcttcccgaagggagaaaggcggacaggtatccggtaagcggcagggtcggaacaggagagcgcacgagggagcttccagggggaaacgcctggtatctttatagtcctgtcgggtttcgccacctctgacttgagcgtcgatttttgtgatgctcgtcaggggggcggagcctatggaaaaacgccagcaacgcggcctttttacggttcctggccttttgctggccttttgctcacatgttctttcctgcgttatcccctgattctgtggataaccgtattaccgcctttgagtgagctgataccgctcgccgcagccgaacgaccgagcgcagcgagtcagtgagcgaggaagcggaagagcgcccaatacgcaaaccgcctctccccgcgcgttggccgattcattaatgcagctggcacgacaggtttcccgactggaaagcgggcagtgagcgcaacgcaattaatgtgagttagctcactcattaggcaccccaggctttacactttatgcttccggctcgtatgttgtgtggaattgtgagcggataacaatttcacacaggaaacagcatatgcaaacaagcattactctgacatccaacgcatccggtacgtttgacggttactattacgaactctggaaggatactggcaatacaacaatgacggtctacactcaaggtcgcttttcctgccagtggtcgaacatcaataacgcgttgtttaggaccgggaagaaatacaaccagaattggcagtctcttggcacaatccggatcacgtactctgcgacttacaacccaaacgggaactcctacttgtgtatctatggctggtctaccaacccattggtcgagttctacatcgttgagtcctgggggaactggagaccgcctggtgcctgcgtgacaggggacactctcatctgcctcgctgacgggcgccgcgttcctattcaggatctcgtggggcattcgccggaggttattgcggtcgacgataagggccgcctcgtttgcgctaagtcagaggtcatctggaaggtcggcgagcggtccgttttcgagatcaagctggcttccgggaggagcattaaggctaccgctgagcacaggctcctggcgttcaagggctggaggcatgttaaggacttcaaagtgggggataggctcgctattgctcaccaggtcccagagccagacaggctcctgcagcattgccagtcggacctgttctgggataggatcgtgtcgattgaggagaaggggtctgaggaggtctacgatctcacagttccaaagtacgcttcttggctcgcggatggggttgtttcacataatacgtccctgggccaagtgacaatcgatggcgggacctacgacatctataggacgacacgcgtcaaccagccttccattgtggggacagccacgttcgatcagtactggagcgtgcgcacctctaagcggacttcaggaacagtgaccgtgaccgatcacttccgcgcctgggcgaaccggggcctgaacctcggcacaatagaccaaattacattgtgcgtggagggttaccaaagctctggatcagccaacatcacccagaacaccttctctcagggctcttcttccggcagttcgggtggctcatccggctccacaacgactactcgcatcgagtgtgagaacatgtccttgtccggaccctacgttagcaggatcaccaatccctttaatggtattgcgctgtacgccaacggagacacagcccgcgctaccgttaacttccccgcaagtcgcaactacaatttccgcctgcggggttgcggcaacaacaataatcttgcccgtgtggacctgaggatcgacggacggaccgtcgggaccttttattaccagggcacatacccctgggaggccccaattgacaatgtttatgtcagtgcggggagtcatacagtcgaaatcactgttactgcggataacggcacatgggacgtgtatgccgactacctggtgatacagtgactcgagggggggcccggtacccaattcgccctatagtgagtcgtattacaattcactggccgtcgttttacaacgtcgtgactgggaaaaccctggcgttacccaacttaatcgccttgcagcacatccccctttcgccagctggcgtaatagcgaagaggcccgcaccgatcgcccttcccaacagttgcgcagcctgaatggcgaatggaaattgtaagcgttaatattttgttaaaattcgcgttaaatttttgttaaatcagctcattttttaaccaataggccgaaatcggcaaaatcccttataaatcaaaagaatagaccgagatagggttgagtgttgttccagtttggaacaagagtccactattaaagaacgtggactccaacgtcaaagggcgaaaaaccgtctatcagggcgatggcccactacgtgaaccatcaccctaatcaagttttttggggtcgaggtgccgtaaagcactaaatcggaaccctaaagggagcccccgatttagagcttgacggggaaagccggcgaacgtggcgagaaaggaagggaagaaagcgaaaggagcgggcgctagggcgctggcaagtgtagcggtcacgctgcgcgtaaccaccacacccgccgcgcttaatgcgccgctacagggcgcgtcaggtg

SEQ ID NO: 3170 - DNA, 5198 bp, Artificial Sequence
  Synthetic Construct, AT-13 intein modified protein encoding nucleic acids in pBluescript
gcacttttcggggaaatgtgcgcggaacccctatttgtttatttttctaaatacattcaaatatgtatccgctcatgagacaataaccctgataaatgcttcaataatattgaaaaaggaagagtatgagtattcaacatttccgtgtcgcccttattcccttttttgcggcattttgccttcctgtttttgctcacccagaaacgctggtgaaagtaaaagatgctgaagatcagttgggtgcacgagtgggttacatcgaactggatctcaacagcggtaagatccttgagagttttcgccccgaagaacgttttccaatgatgagcacttttaaagttctgctatgtggcgcggtattatcccgtattgacgccgggcaagagcaactcggtcgccgcatacactattctcagaatgacttggttgagtactcaccagtcacagaaaagcatcttacggatggcatgacagtaagagaattatgcagtgctgccataaccatgagtgataacactgcggccaacttacttctgacaacgatcggaggaccgaaggagctaaccgcttttttgcacaacatgggggatcatgtaactcgccttgatcgttgggaaccggagctgaatgaagccataccaaacgacgagcgtgacaccacgatgcctgtagcaatggcaacaacgttgcgcaaactattaactggcgaactacttactctagcttcccggcaacaattaatagactggatggaggcggataaagttgcaggaccacttctgcgctcggcccttccggctggctggtttattgctgataaatctggagccggtgagcgtgggtctcgcggtatcattgcagcactggggccagatggtaagccctcccgtatcgtagttatctacacgacggggagtcaggcaactatggatgaacgaaatagacagatcgctgagataggtgcctcactgattaagcattggtaactgtcagaccaagtttactcatatatactttagattgatttaaaacttcatttttaatttaaaaggatctaggtgaagatcctttttgataatctcatgaccaaaatcccttaacgtgagttttcgttccactgagcgtcagaccccgtagaaaagatcaaaggatcttcttgagatcctttttttctgcgcgtaatctgctgcttgcaaacaaaaaaaccaccgctaccagcggtggtttgtttgccggatcaagagctaccaactctttttccgaaggtaactggcttcagcagagcgcagataccaaatactgtccttctagtgtagccgtagttaggccaccacttcaagaactctgtagcaccgcctacatacctcgctctgctaatcctgttaccagtggctgctgccagtggcgataagtcgtgtcttaccgggttggactcaagacgatagttaccggataaggcgcagcggtcgggctgaacggggggttcgtgcacacagcccagcttggagcgaacgacctacaccgaactgagatacctacagcgtgagctatgagaaagcgccacgcttcccgaagggagaaaggcggacaggtatccggtaagcggcagggtcggaacaggagagcgcacgagggagcttccagggggaaacgcctggtatctttatagtcctgtcgggtttcgccacctctgacttgagcgtcgatttttgtgatgctcgtcaggggggcggagcctatggaaaaacgccagcaacgcggcctttttacggttcctggccttttgctggccttttgctcacatgttctttcctgcgttatcccctgattctgtggataaccgtattaccgcctttgagtgagctgataccgctcgccgcagccgaacgaccgagcgcagcgagtcagtgagcgaggaagcggaagagcgcccaatacgcaaaccgcctctccccgcgcgttggccgattcattaatgcagctggcacgacaggtttcccgactggaaagcgggcagtgagcgcaacgcaattaatgtgagttagctcactcattaggcaccccaggctttacactttatgcttccggctcgtatgttgtgtggaattgtgagcggataacaatttcacacaggaaacagcatatgcaaacaagcattactctgacatccaacgcatccggtacgtttgacggttactattacgaactctggaaggatactggcaatacaacaatgacggtctacactcaaggtcgcttttcctgccagtggtcgaacatcaataacgcgttgtttaggaccgggaagaaatacaaccagaattggcagtctcttggcacaatccggatcacgtactctgcgacttacaacccaaacgggaactcctacttgtgtatctatggctggtctaccaacccattggtcgagttctacatcgttgagtcctgggggaactggagaccgcctggtgcctgcctgacatcggaccatacggttctcactacaaggggctggattcctatcgctgacgttactctggatgacaaggtcgctgttctcgacaacaatacgggcgagatgtcctaccagaacccacagaaggtccacaagtacgactacgagggccctatgtacgaggttaagactgccggggtcgatctgttcgttaccccaaaccataggatgtatgtgaataccacgaacaatacaactaaccagaattacaacctcgttgaggcttccagcatcttcggcaagaaggtgcggtacaagaacgacgcgatctggaataagaccgattaccagttcattctcccggagacagccactctgaccgggcacacgaacaagatctcgtctacaccggcgattcagcccgagatgaacgcttggctcacgttcttcggcctgtggatcgcgaacgggcataccacgaagattgccgagaagacagcggagaacaatcagcagaagcagcgctacaaggtcatcctgacgcaggtgaaggaggacgtctgcgatatcattgagcagacactcaacaagctgggcttcaatttcatcaggtccgggaaggactacacgattgagaacaagcagctctggagctacctgaatccgttcgacaacggcgccctcaataagtacctgcccgattgggtctgggagctctcatcccagcagtgcaagatcctcctgaacagcctctgcctgggcaattgcctgttcactaagaacgacgataccctccactacttctccaccagcgagaggttcgctaacgacgtgtcgcgcctcgctctgcatgctggcacaacttctactatccagctggaggccgcgccatcaaacctgtacgataccatcattgggctccctgttgaagtgaataccacgctgtggcgggtcatcattaaccagagctcgttctactcgtactctactgacaagtcttcagccctcaacctgagcaacaatgttgcgtgctacgtgaacgcgcagagcgctctcacactggagcagaactcgcagaagatcaataagaacactctcgtcctgaccaagaacaatgttaagtcacagacgatgcactcccagagggctgagagggtggacacggctctcctgacacagaaggagctcgataattcgctgaaccatgagatcctgattaataagaacccgggcacctctcagctggagtgcgtggtcaatcccgaggtcaacaatacgtccacaaacgataggttcgtgtactacaaggggccggtctactgcctcactgggcctaacaatgttttctacgttcagaggaatggcaaggctgtttggactggcaacacgtccctgggccaagtgacaatcgatggcgggacctacgacatctataggacgacacgcgtcaaccagccttccattgtggggacagccacgttcgatcagtactggagcgtgcgcacctctaagcggacttcaggaacagtgaccgtgaccgatcacttccgcgcctgggcgaaccggggcctgaacctcggcacaatagaccaaattacattgtgcgtggagggttaccaaagctctggatcagccaacatcacccagaacaccttctctcagggctcttcttccggcagttcgggtggctcatccggctccacaacgactactcgcatcgagtgtgagaacatgtccttgtccggaccctacgttagcaggatcaccaatccctttaatggtattgcgctgtacgccaacggagacacagcccgcgctaccgttaacttccccgcaagtcgcaactacaatttccgcctgcggggttgcggcaacaacaataatcttgcccgtgtggacctgaggatcgacggacggaccgtcgggaccttttattaccagggcacatacccctgggaggccccaattgacaatgtttatgtcagtgcggggagtcatacagtcgaaatcactgttactgcggataacggcacatgggacgtgtatgccgactacctggtgatacagtgactcgagggggggcccggtacccaattcgccctatagtgagtcgtattacaattcactggccgtcgttttacaacgtcgtgactgggaaaaccctggcgttacccaacttaatcgccttgcagcacatccccctttcgccagctggcgtaatagcgaagaggcccgcaccgatcgcccttcccaacagttgcgcagcctgaatggcgaatggaaattgtaagcgttaatattttgttaaaattcgcgttaaatttttgttaaatcagctcattttttaaccaataggccgaaatcggcaaaatcccttataaatcaaaagaatagaccgagatagggttgagtgttgttccagtttggaacaagagtccactattaaagaacgtggactccaacgtcaaagggcgaaaaaccgtctatcagggcgatggcccactacgtgaaccatcaccctaatcaagttttttggggtcgaggtgccgtaaagcactaaatcggaaccctaaagggagcccccgatttagagcttgacggggaaagccggcgaacgtggcgagaaaggaagggaagaaagcgaaaggagcgggcgctagggcgctggcaagtgtagcggtcacgctgcgcgtaaccaccacacccgccgcgcttaatgcgccgctacagggcgcgtcaggtg

SEQ ID NO: 3171 - DNA, 4865 bp, Artificial Sequence
  Synthetic Construct, AT-14 intein modified protein encoding nucleic acids in pBluescript
gcacttttcggggaaatgtgcgcggaacccctatttgtttatttttctaaatacattcaaatatgtatccgctcatgagacaataaccctgataaatgcttcaataatattgaaaaaggaagagtatgagtattcaacatttccgtgtcgcccttattcccttttttgcggcattttgccttcctgtttttgctcacccagaaacgctggtgaaagtaaaagatgctgaagatcagttgggtgcacgagtgggttacatcgaactggatctcaacagcggtaagatccttgagagttttcgccccgaagaacgttttccaatgatgagcacttttaaagttctgctatgtggcgcggtattatcccgtattgacgccgggcaagagcaactcggtcgccgcatacactattctcagaatgacttggttgagtactcaccagtcacagaaaagcatcttacggatggcatgacagtaagagaattatgcagtgctgccataaccatgagtgataacactgcggccaacttacttctgacaacgatcggaggaccgaaggagctaaccgcttttttgcacaacatgggggatcatgtaactcgccttgatcgttgggaaccggagctgaatgaagccataccaaacgacgagcgtgacaccacgatgcctgtagcaatggcaacaacgttgcgcaaactattaactggcgaactacttactctagcttcccggcaacaattaatagactggatggaggcggataaagttgcaggaccacttctgcgctcggcccttccggctggctggtttattgctgataaatctggagccggtgagcgtgggtctcgcggtatcattgcagcactggggccagatggtaagccctcccgtatcgtagttatctacacgacggggagtcaggcaactatggatgaacgaaatagacagatcgctgagataggtgcctcactgattaagcattggtaactgtcagaccaagtttactcatatatactttagattgatttaaaacttcatttttaatttaaaaggatctaggtgaagatcctttttgataatctcatgaccaaaatcccttaacgtgagttttcgttccactgagcgtcagaccccgtagaaaagatcaaaggatcttcttgagatcctttttttctgcgcgtaatctgctgcttgcaaacaaaaaaaccaccgctaccagcggtggtttgtttgccggatcaagagctaccaactctttttccgaaggtaactggcttcagcagagcgcagataccaaatactgtccttctagtgtagccgtagttaggccaccacttcaagaactctgtagcaccgcctacatacctcgctctgctaatcctgttaccagtggctgctgccagtggcgataagtcgtgtcttaccgggttggactcaagacgatagttaccggataaggcgcagcggtcgggctgaacggggggttcgtgcacacagcccagcttggagcgaacgacctacaccgaactgagatacctacagcgtgagctatgagaaagcgccacgcttcccgaagggagaaaggcggacaggtatccggtaagcggcagggtcggaacaggagagcgcacgagggagcttccagggggaaacgcctggtatctttatagtcctgtcgggtttcgccacctctgacttgagcgtcgatttttgtgatgctcgtcaggggggcggagcctatggaaaaacgccagcaacgcggcctttttacggttcctggccttttgctggccttttgctcacatgttctttcctgcgttatcccctgattctgtggataaccgtattaccgcctttgagtgagctgataccgctcgccgcagccgaacgaccgagcgcagcgagtcagtgagcgaggaagcggaagagcgcccaatacgcaaaccgcctctccccgcgcgttggccgattcattaatgcagctggcacgacaggtttcccgactggaaagcgggcagtgagcgcaacgcaattaatgtgagttagctcactcattaggcaccccaggctttacactttatgcttccggctcgtatgttgtgtggaattgtgagcggataacaatttcacacaggaaacagcatatgcaaacaagcattactctgacatccaacgcatccggtacgtttgacggttactattacgaactctggaaggatactggcaatacaacaatgacggtctacactcaaggtcgcttttcctgccagtggtcgaacatcaataacgcgttgtttaggaccgggaagaaatacaaccagaattggcagtctcttggcacaatccggatcacgtactctgcgacttacaacccaaacgggaactcctacttgtgtatctatggctggtctaccaacccattggtcgagttctacatcgttgagtcctgggggaactggagaccgcctggtgcctgcgttacgggggacactctcgttttcactgacaaggggctgattgaggctcgcaagctggaggtcggcatgaaggtctggtcgggggacggctggaacgagatcaaggaggtcattaacaatggggtgaagccggtcctgaagctcaagctgaagaccggcctggagatcaaggttacggaggagcacaagatcttcacaggcgaggggtggaaggaggccaaggacctcaaggttggcgataagctctacctgccggtgtcttaccccgagctggacttccccgtcaaggaggagaacgatttctacgagttcctcggctacttcctgggcgacgggtcactctccgttagcaaccacgtgtccctgcatgtcgggaatgacaaggagctcgcgctgtacttcaaggagaaggttgagaagtacgctggcgctgcttacctgatcgagagggacgggcagtacatcattgatgtgcatcgcaaggagttcgccgagaagatcaagaagattttcggcatcgagattaccgactcgaaggagaaggatatcccgtccagcctcctggcggtgaactccgaggctatgaaggctctcctgaggggcctcttctcggctgacgggtctgtctacgatgctaatggctctatcacagttgccctgtcgtctacttcatacccactcctgcggaaggtccagatcctcctgctctcactcggcattccttccacactgactggggagaaggaccaggatgtgaagatcattaagggcaacgagtacgagaccctcccaacgtaccgcctgatcattagcggggagagggcctcgctcttcttcaataagatcggcctgattggggagaagaagaagaagttcctggagctgatggcgggcaagaccacgtactccaccctcaacaatcacctgtaccaggagatcgtgagcattgagcccgctggcgaggaggaggtcttcgatattacagctccaccaaagtacacttggattaccaatggcattctctctctggatacgtccctgggccaagtgacaatcgatggcgggacctacgacatctataggacgacacgcgtcaaccagccttccattgtggggacagccacgttcgatcagtactggagcgtgcgcacctctaagcggacttcaggaacagtgaccgtgaccgatcacttccgcgcctgggcgaaccggggcctgaacctcggcacaatagaccaaattacattgtgcgtggagggttaccaaagctctggatcagccaacatcacccagaacaccttctctcagggctcttcttccggcagttcgggtggctcatccggctccacaacgactactcgcatcgagtgtgagaacatgtccttgtccggaccctacgttagcaggatcaccaatccctttaatggtattgcgctgtacgccaacggagacacagcccgcgctaccgttaacttccccgcaagtcgcaactacaatttccgcctgcggggttgcggcaacaacaataatcttgcccgtgtggacctgaggatcgacggacggaccgtcgggaccttttattaccagggcacatacccctgggaggccccaattgacaatgtttatgtcagtgcggggagtcatacagtcgaaatcactgttactgcggataacggcacatgggacgtgtatgccgactacctggtgatacagtgactcgagggggggcccggtacccaattcgccctatagtgagtcgtattacaattcactggccgtcgttttacaacgtcgtgactgggaaaaccctggcgttacccaacttaatcgccttgcagcacatccccctttcgccagctggcgtaatagcgaagaggcccgcaccgatcgcccttcccaacagttgcgcagcctgaatggcgaatggaaattgtaagcgttaatattttgttaaaattcgcgttaaatttttgttaaatcagctcattttttaaccaataggccgaaatcggcaaaatcccttataaatcaaaagaatagaccgagatagggttgagtgttgttccagtttggaacaagagtccactattaaagaacgtggactccaacgtcaaagggcgaaaaaccgtctatcagggcgatggcccactacgtgaaccatcaccctaatcaagttttttggggtcgaggtgccgtaaagcactaaatcggaaccctaaagggagcccccgatttagagcttgacggggaaagccggcgaacgtggcgagaaaggaagggaagaaagcgaaaggagcgggcgctagggcgctggcaagtgtagcggtcacgctgcgcgtaaccaccacacccgccgcgcttaatgcgccgctacagggcgcgtcaggtg

SEQ ID NO: 3172 - DNA, 4235 bp, Artificial Sequence
  Synthetic Construct, AT-15 intein modified protein encoding nucleic acids in pBluescript
gcacttttcggggaaatgtgcgcggaacccctatttgtttatttttctaaatacattcaaatatgtatccgctcatgagacaataaccctgataaatgcttcaataatattgaaaaaggaagagtatgagtattcaacatttccgtgtcgcccttattcccttttttgcggcattttgccttcctgtttttgctcacccagaaacgctggtgaaagtaaaagatgctgaagatcagttgggtgcacgagtgggttacatcgaactggatctcaacagcggtaagatccttgagagttttcgccccgaagaacgttttccaatgatgagcacttttaaagttctgctatgtggcgcggtattatcccgtattgacgccgggcaagagcaactcggtcgccgcatacactattctcagaatgacttggttgagtactcaccagtcacagaaaagcatcttacggatggcatgacagtaagagaattatgcagtgctgccataaccatgagtgataacactgcggccaacttacttctgacaacgatcggaggaccgaaggagctaaccgcttttttgcacaacatgggggatcatgtaactcgccttgatcgttgggaaccggagctgaatgaagccataccaaacgacgagcgtgacaccacgatgcctgtagcaatggcaacaacgttgcgcaaactattaactggcgaactacttactctagcttcccggcaacaattaatagactggatggaggcggataaagttgcaggaccacttctgcgctcggcccttccggctggctggtttattgctgataaatctggagccggtgagcgtgggtctcgcggtatcattgcagcactggggccagatggtaagccctcccgtatcgtagttatctacacgacggggagtcaggcaactatggatgaacgaaatagacagatcgctgagataggtgcctcactgattaagcattggtaactgtcagaccaagtttactcatatatactttagattgatttaaaacttcatttttaatttaaaaggatctaggtgaagatcctttttgataatctcatgaccaaaatcccttaacgtgagttttcgttccactgagcgtcagaccccgtagaaaagatcaaaggatcttcttgagatcctttttttctgcgcgtaatctgctgcttgcaaacaaaaaaaccaccgctaccagcggtggtttgtttgccggatcaagagctaccaactctttttccgaaggtaactggcttcagcagagcgcagataccaaatactgtccttctagtgtagccgtagttaggccaccacttcaagaactctgtagcaccgcctacatacctcgctctgctaatcctgttaccagtggctgctgccagtggcgataagtcgtgtcttaccgggttggactcaagacgatagttaccggataaggcgcagcggtcgggctgaacggggggttcgtgcacacagcccagcttggagcgaacgacctacaccgaactgagatacctacagcgtgagctatgagaaagcgccacgcttcccgaagggagaaaggcggacaggtatccggtaagcggcagggtcggaacaggagagcgcacgagggagcttccagggggaaacgcctggtatctttatagtcctgtcgggtttcgccacctctgacttgagcgtcgatttttgtgatgctcgtcaggggggcggagcctatggaaaaacgccagcaacgcggcctttttacggttcctggccttttgctggccttttgctcacatgttctttcctgcgttatcccctgattctgtggataaccgtattaccgcctttgagtgagctgataccgctcgccgcagccgaacgaccgagcgcagcgagtcagtgagcgaggaagcggaagagcgcccaatacgcaaaccgcctctccccgcgcgttggccgattcattaatgcagctggcacgacaggtttcccgactggaaagcgggcagtgagcgcaacgcaattaatgtgagttagctcactcattaggcaccccaggctttacactttatgcttccggctcgtatgttgtgtggaattgtgagcggataacaatttcacacaggaaacagcatatgcaaacaagcattactctgacatccaacgcatccggtacgtttgacggttactattacgaactctggaaggatactggcaatacaacaatgacggtctacactcaaggtcgcttttcctgccagtggtcgaacatcaataacgcgttgtttaggaccgggaagaaatacaaccagaattggcagtctcttggcacaatccggatcacgtactctgcgacttacaacccaaacgggaactcctacttgtgtatctatggctggtctaccaacccattggtcgagttctacatcgttgagtcctgggggaactggagaccgcctggtgcctgcttcgtggcgggcactatgatcctgacagtcgcggggctggtcgctattgagaatattaaggcgggggacaaggtcatcgctactaacccggagacattcgaggtggctgagaagaccgtcctggagacctacgtgcgcgagaccacggagctcctgcacctgacgatcaatggcgacgtcattaagacaactttcgagcatctcttctacgccaaggatgtcgggttcgttgaggcgaaggagctgcaggtcggcgacaagctcctggattccaaggggaacgtgctcgtggtcgaggacaagaagatcaagattaccgatgagcccgttaaggtgtacaatttccaggttgatgacttccacacataccacgttgggtgcaatggggttctcgttcataatacgtccctgggccaagtgacaatcgatggcgggacctacgacatctataggacgacacgcgtcaaccagccttccattgtggggacagccacgttcgatcagtactggagcgtgcgcacctctaagcggacttcaggaacagtgaccgtgaccgatcacttccgcgcctgggcgaaccggggcctgaacctcggcacaatagaccaaattacattgtgcgtggagggttaccaaagctctggatcagccaacatcacccagaacaccttctctcagggctcttcttccggcagttcgggtggctcatccggctccacaacgactactcgcatcgagtgtgagaacatgtccttgtccggaccctacgttagcaggatcaccaatccctttaatggtattgcgctgtacgccaacggagacacagcccgcgctaccgttaacttccccgcaagtcgcaactacaatttccgcctgcggggttgcggcaacaacaataatcttgcccgtgtggacctgaggatcgacggacggaccgtcgggaccttttattaccagggcacatacccctgggaggccccaattgacaatgtttatgtcagtgcggggagtcatacagtcgaaatcactgttactgcggataacggcacatgggacgtgtatgccgactacctggtgatacagtgactcgagggggggcccggtacccaattcgccctatagtgagtcgtattacaattcactggccgtcgttttacaacgtcgtgactgggaaaaccctggcgttacccaacttaatcgccttgcagcacatccccctttcgccagctggcgtaatagcgaagaggcccgcaccgatcgcccttcccaacagttgcgcagcctgaatggcgaatggaaattgtaagcgttaatattttgttaaaattcgcgttaaatttttgttaaatcagctcattttttaaccaataggccgaaatcggcaaaatcccttataaatcaaaagaatagaccgagatagggttgagtgttgttccagtttggaacaagagtccactattaaagaacgtggactccaacgtcaaagggcgaaaaaccgtctatcagggcgatggcccactacgtgaaccatcaccctaatcaagttttttggggtcgaggtgccgtaaagcactaaatcggaaccctaaagggagcccccgatttagagcttgacggggaaagccggcgaacgtggcgagaaaggaagggaagaaagcgaaaggagcgggcgctagggcgctggcaagtgtagcggtcacgctgcgcgtaaccaccacacccgccgcgcttaatgcgccgctacagggcgcgtcaggtg

SEQ ID NO: 3173 - DNA, 4829 bp, Artificial Sequence
  Synthetic Construct, AT-16 intein modified protein encoding nucleic acids in pBluescript
gcacttttcggggaaatgtgcgcggaacccctatttgtttatttttctaaatacattcaaatatgtatccgctcatgagacaataaccctgataaatgcttcaataatattgaaaaaggaagagtatgagtattcaacatttccgtgtcgcccttattcccttttttgcggcattttgccttcctgtttttgctcacccagaaacgctggtgaaagtaaaagatgctgaagatcagttgggtgcacgagtgggttacatcgaactggatctcaacagcggtaagatccttgagagttttcgccccgaagaacgttttccaatgatgagcacttttaaagttctgctatgtggcgcggtattatcccgtattgacgccgggcaagagcaactcggtcgccgcatacactattctcagaatgacttggttgagtactcaccagtcacagaaaagcatcttacggatggcatgacagtaagagaattatgcagtgctgccataaccatgagtgataacactgcggccaacttacttctgacaacgatcggaggaccgaaggagctaaccgcttttttgcacaacatgggggatcatgtaactcgccttgatcgttgggaaccggagctgaatgaagccataccaaacgacgagcgtgacaccacgatgcctgtagcaatggcaacaacgttgcgcaaactattaactggcgaactacttactctagcttcccggcaacaattaatagactggatggaggcggataaagttgcaggaccacttctgcgctcggcccttccggctggctggtttattgctgataaatctggagccggtgagcgtgggtctcgcggtatcattgcagcactggggccagatggtaagccctcccgtatcgtagttatctacacgacggggagtcaggcaactatggatgaacgaaatagacagatcgctgagataggtgcctcactgattaagcattggtaactgtcagaccaagtttactcatatatactttagattgatttaaaacttcatttttaatttaaaaggatctaggtgaagatcctttttgataatctcatgaccaaaatcccttaacgtgagttttcgttccactgagcgtcagaccccgtagaaaagatcaaaggatcttcttgagatcctttttttctgcgcgtaatctgctgcttgcaaacaaaaaaaccaccgctaccagcggtggtttgtttgccggatcaagagctaccaactctttttccgaaggtaactggcttcagcagagcgcagataccaaatactgtccttctagtgtagccgtagttaggccaccacttcaagaactctgtagcaccgcctacatacctcgctctgctaatcctgttaccagtggctgctgccagtggcgataagtcgtgtcttaccgggttggactcaagacgatagttaccggataaggcgcagcggtcgggctgaacggggggttcgtgcacacagcccagcttggagcgaacgacctacaccgaactgagatacctacagcgtgagctatgagaaagcgccacgcttcccgaagggagaaaggcggacaggtatccggtaagcggcagggtcggaacaggagagcgcacgagggagcttccagggggaaacgcctggtatctttatagtcctgtcgggtttcgccacctctgacttgagcgtcgatttttgtgatgctcgtcaggggggcggagcctatggaaaaacgccagcaacgcggcctttttacggttcctggccttttgctggccttttgctcacatgttctttcctgcgttatcccctgattctgtggataaccgtattaccgcctttgagtgagctgataccgctcgccgcagccgaacgaccgagcgcagcgagtcagtgagcgaggaagcggaagagcgcccaatacgcaaaccgcctctccccgcgcgttggccgattcattaatgcagctggcacgacaggtttcccgactggaaagcgggcagtgagcgcaacgcaattaatgtgagttagctcactcattaggcaccccaggctttacactttatgcttccggctcgtatgttgtgtggaattgtgagcggataacaatttcacacaggaaacagcatatgcaaacaagcattactctgacatccaacgcatccggtacgtttgacggttactattacgaactctggaaggatactggcaatacaacaatgacggtctacactcaaggtcgcttttcctgccagtggtcgaacatcaataacgcgttgtttaggaccgggaagaaatacaaccagaattggcagtctcttggcacaatccggatcacgtactctgcgacttacaacccaaacgggaactcctacttgtgtatctatggctggtctaccaacccattggtcgagttctacatcgttgagtcctgggggaactggagaccgcctggtgcccagctggctctggacactcctattcctacgcctgacgggtggacaactatgggggagatcaaggcgggggacaaggttatcgatgagaagggcaggccgtgcaatgtggtcgctatctccgagattgacgatacagagcaggcctacaagatcaacttccgggacggcactagcattgtcgccggggagcgccacctctggaaggttcaggtgaccaacaatggcaggagggagaagctcctgaccacgggggagatgtaccagaagcagttcaagaccaagtcgaaggagaatcgcgcgctcttcaggatcccaattgccgacgcgttcatcctccctgagaacaagctgccgattgatccctacctgttcggctactggatcggcaacgggaatgctgtgaagccggagatcacagtcatgcgcgacgatgtcgacgaggttatcaagaacattccctacaagctccataataggtacaagcaggagggcaactcagacatcctggtttacaaggagctcaagtccattctggtgaagaacttcagggagaagcggatcccaattgagtacctcagggcttctgctcagcagcggaagcgcctcctgcagggcctgatcgactcagatgggtgcgtctccacagccaagagccaggcgatctacgttactattctcttcgagctggccaaggacgtgcaggatctcctgtggagcctcggcatcaagaacacactgaagactgctccatcggctcgctacggcatcgagaccggggagatctgctacctcattaagttcacggcgttcaatgacctggaggtgagcggcctcgataggaagctgaagagggggcgggagcgcaacatcaagacccggtcgcacttccattacatcaagtctattgagaagaccggcaagacgaagatgcgctgcatccaggttgattctccaagcaggctctacctcgctggcaagtctatgattccaacacataacacgtccctgggccaagtgacaatcgatggcgggacctacgacatctataggacgacacgcgtcaaccagccttccattgtggggacagccacgttcgatcagtactggagcgtgcgcacctctaagcggacttcaggaacagtgaccgtgaccgatcacttccgcgcctgggcgaaccggggcctgaacctcggcacaatagaccaaattacattgtgcgtggagggttaccaaagctctggatcagccaacatcacccagaacaccttctctcagggctcttcttccggcagttcgggtggctcatccggctccacaacgactactcgcatcgagtgtgagaacatgtccttgtccggaccctacgttagcaggatcaccaatccctttaatggtattgcgctgtacgccaacggagacacagcccgcgctaccgttaacttccccgcaagtcgcaactacaatttccgcctgcggggttgcggcaacaacaataatcttgcccgtgtggacctgaggatcgacggacggaccgtcgggaccttttattaccagggcacatacccctgggaggccccaattgacaatgtttatgtcagtgcggggagtcatacagtcgaaatcactgttactgcggataacggcacatgggacgtgtatgccgactacctggtgatacagtgactcgagggggggcccggtacccaattcgccctatagtgagtcgtattacaattcactggccgtcgttttacaacgtcgtgactgggaaaaccctggcgttacccaacttaatcgccttgcagcacatccccctttcgccagctggcgtaatagcgaagaggcccgcaccgatcgcccttcccaacagttgcgcagcctgaatggcgaatggaaattgtaagcgttaatattttgttaaaattcgcgttaaatttttgttaaatcagctcattttttaaccaataggccgaaatcggcaaaatcccttataaatcaaaagaatagaccgagatagggttgagtgttgttccagtttggaacaagagtccactattaaagaacgtggactccaacgtcaaagggcgaaaaaccgtctatcagggcgatggcccactacgtgaaccatcaccctaatcaagttttttggggtcgaggtgccgtaaagcactaaatcggaaccctaaagggagcccccgatttagagcttgacggggaaagccggcgaacgtggcgagaaaggaagggaagaaagcgaaaggagcgggcgctagggcgctggcaagtgtagcggtcacgctgcgcgtaaccaccacacccgccgcgcttaatgcgccgctacagggcgcgtcaggtg

SEQ ID NO: 3174 - DNA, 4838 bp, Artificial Sequence
  Synthetic Construct, AT-17 intein modified protein encoding nucleic acids in pBluescript
gcacttttcggggaaatgtgcgcggaacccctatttgtttatttttctaaatacattcaaatatgtatccgctcatgagacaataaccctgataaatgcttcaataatattgaaaaaggaagagtatgagtattcaacatttccgtgtcgcccttattcccttttttgcggcattttgccttcctgtttttgctcacccagaaacgctggtgaaagtaaaagatgctgaagatcagttgggtgcacgagtgggttacatcgaactggatctcaacagcggtaagatccttgagagttttcgccccgaagaacgttttccaatgatgagcacttttaaagttctgctatgtggcgcggtattatcccgtattgacgccgggcaagagcaactcggtcgccgcatacactattctcagaatgacttggttgagtactcaccagtcacagaaaagcatcttacggatggcatgacagtaagagaattatgcagtgctgccataaccatgagtgataacactgcggccaacttacttctgacaacgatcggaggaccgaaggagctaaccgcttttttgcacaacatgggggatcatgtaactcgccttgatcgttgggaaccggagctgaatgaagccataccaaacgacgagcgtgacaccacgatgcctgtagcaatggcaacaacgttgcgcaaactattaactggcgaactacttactctagcttcccggcaacaattaatagactggatggaggcggataaagttgcaggaccacttctgcgctcggcccttccggctggctggtttattgctgataaatctggagccggtgagcgtgggtctcgcggtatcattgcagcactggggccagatggtaagccctcccgtatcgtagttatctacacgacggggagtcaggcaactatggatgaacgaaatagacagatcgctgagataggtgcctcactgattaagcattggtaactgtcagaccaagtttactcatatatactttagattgatttaaaacttcatttttaatttaaaaggatctaggtgaagatcctttttgataatctcatgaccaaaatcccttaacgtgagttttcgttccactgagcgtcagaccccgtagaaaagatcaaaggatcttcttgagatcctttttttctgcgcgtaatctgctgcttgcaaacaaaaaaaccaccgctaccagcggtggtttgtttgccggatcaagagctaccaactctttttccgaaggtaactggcttcagcagagcgcagataccaaatactgtccttctagtgtagccgtagttaggccaccacttcaagaactctgtagcaccgcctacatacctcgctctgctaatcctgttaccagtggctgctgccagtggcgataagtcgtgtcttaccgggttggactcaagacgatagttaccggataaggcgcagcggtcgggctgaacggggggttcgtgcacacagcccagcttggagcgaacgacctacaccgaactgagatacctacagcgtgagctatgagaaagcgccacgcttcccgaagggagaaaggcggacaggtatccggtaagcggcagggtcggaacaggagagcgcacgagggagcttccagggggaaacgcctggtatctttatagtcctgtcgggtttcgccacctctgacttgagcgtcgatttttgtgatgctcgtcaggggggcggagcctatggaaaaacgccagcaacgcggcctttttacggttcctggccttttgctggccttttgctcacatgttctttcctgcgttatcccctgattctgtggataaccgtattaccgcctttgagtgagctgataccgctcgccgcagccgaacgaccgagcgcagcgagtcagtgagcgaggaagcggaagagcgcccaatacgcaaaccgcctctccccgcgcgttggccgattcattaatgcagctggcacgacaggtttcccgactggaaagcgggcagtgagcgcaacgcaattaatgtgagttagctcactcattaggcaccccaggctttacactttatgcttccggctcgtatgttgtgtggaattgtgagcggataacaatttcacacaggaaacagcatatgcaaacaagcattactctgacatccaacgcatccggtacgtttgacggttactattacgaactctggaaggatactggcaatacaacaatgacggtctacactcaaggtcgcttttcctgccagtggtcgaacatcaataacgcgttgtttaggaccgggaagaaatacaaccagaattggcagtctcttggcacaatccggatcacgtactctgcgacttacaacccaaacgggaactcctacttgtgtatctatggctggtctaccaacccattggtcgagttctacatcgttgagtcctgggggaactggagaccgcctggtgcctgcgtggcgggggacactaagattctcacatcatcgggctaccatcccatcaaggacatggagggcaagcaggttcgggtttggaatggctacgagttctcggagacaatcgttcacaagactggggtgaaccagaagctcattatggtgtctctggacgatggcaccgagctcaggtgcacgccgtaccataagttctacatcgagaccgggtcgcggccagctgacaagtctcgggtcatggaggttcgcgctggcgacctggagaagggggaccgcatcattaggttcgagctgccgacaatcactgtcggcgagaccacgatgagcgacaaggaggcctacacaaagggcttcttctctgcggatgggtgcgtcattaagtcaaagtacggcgaggatgagtacaggatctcggttaagcgggaggacaagattgaggctctgacgaagtatgtggatgtgatcaagtcccacacaaaccggttccgcactcatttctacgtgccagactacgtccagaataagttcgaggtccctatcaactcaatggttaatgagaagatttcctggctcgccggcttcatggacggcgatgggtgcgttatccgctacaaggacattgagaacatgcaggcggtgtccatcaataagagcttcctgcaggatattaggctcatgctgcagaccatcggcattcactccacgatcaacaagttcatgccgaatcgcgtgatgaagatgcccgatggcaggggcgggaccgacatgtacaacggggctgagagctggaggctccagatcgactcggagggcgtccgcaagctcttcgctctggggttcacgccgcgcaggctgaagatgaacggctccaggaagcggcaccataagaccaataagttcacgcgcgtggtcagcgtgacagaccatggcgatgtcgaggacacttactgcttcaatgagccaaagaggcacatgggggtcttcaacggggtcattacggggcagacgtccctgggccaagtgacaatcgatggcgggacctacgacatctataggacgacacgcgtcaaccagccttccattgtggggacagccacgttcgatcagtactggagcgtgcgcacctctaagcggacttcaggaacagtgaccgtgaccgatcacttccgcgcctgggcgaaccggggcctgaacctcggcacaatagaccaaattacattgtgcgtggagggttaccaaagctctggatcagccaacatcacccagaacaccttctctcagggctcttcttccggcagttcgggtggctcatccggctccacaacgactactcgcatcgagtgtgagaacatgtccttgtccggaccctacgttagcaggatcaccaatccctttaatggtattgcgctgtacgccaacggagacacagcccgcgctaccgttaacttccccgcaagtcgcaactacaatttccgcctgcggggttgcggcaacaacaataatcttgcccgtgtggacctgaggatcgacggacggaccgtcgggaccttttattaccagggcacatacccctgggaggccccaattgacaatgtttatgtcagtgcggggagtcatacagtcgaaatcactgttactgcggataacggcacatgggacgtgtatgccgactacctggtgatacagtgactcgagggggggcccggtacccaattcgccctatagtgagtcgtattacaattcactggccgtcgttttacaacgtcgtgactgggaaaaccctggcgttacccaacttaatcgccttgcagcacatccccctttcgccagctggcgtaatagcgaagaggcccgcaccgatcgcccttcccaacagttgcgcagcctgaatggcgaatggaaattgtaagcgttaatattttgttaaaattcgcgttaaatttttgttaaatcagctcattttttaaccaataggccgaaatcggcaaaatcccttataaatcaaaagaatagaccgagatagggttgagtgttgttccagtttggaacaagagtccactattaaagaacgtggactccaacgtcaaagggcgaaaaaccgtctatcagggcgatggcccactacgtgaaccatcaccctaatcaagttttttggggtcgaggtgccgtaaagcactaaatcggaaccctaaagggagcccccgatttagagcttgacggggaaagccggcgaacgtggcgagaaaggaagggaagaaagcgaaaggagcgggcgctagggcgctggcaagtgtagcggtcacgctgcgcgtaaccaccacacccgccgcgcttaatgcgccgctacagggcgcgtcaggtg

SEQ ID NO: 3175 - DNA, 5012 bp, Artificial Sequence
  Synthetic Construct, AT-18 intein modified protein encoding nucleic acids in pBluescript
gcacttttcggggaaatgtgcgcggaacccctatttgtttatttttctaaatacattcaaatatgtatccgctcatgagacaataaccctgataaatgcttcaataatattgaaaaaggaagagtatgagtattcaacatttccgtgtcgcccttattcccttttttgcggcattttgccttcctgtttttgctcacccagaaacgctggtgaaagtaaaagatgctgaagatcagttgggtgcacgagtgggttacatcgaactggatctcaacagcggtaagatccttgagagttttcgccccgaagaacgttttccaatgatgagcacttttaaagttctgctatgtggcgcggtattatcccgtattgacgccgggcaagagcaactcggtcgccgcatacactattctcagaatgacttggttgagtactcaccagtcacagaaaagcatcttacggatggcatgacagtaagagaattatgcagtgctgccataaccatgagtgataacactgcggccaacttacttctgacaacgatcggaggaccgaaggagctaaccgcttttttgcacaacatgggggatcatgtaactcgccttgatcgttgggaaccggagctgaatgaagccataccaaacgacgagcgtgacaccacgatgcctgtagcaatggcaacaacgttgcgcaaactattaactggcgaactacttactctagcttcccggcaacaattaatagactggatggaggcggataaagttgcaggaccacttctgcgctcggcccttccggctggctggtttattgctgataaatctggagccggtgagcgtgggtctcgcggtatcattgcagcactggggccagatggtaagccctcccgtatcgtagttatctacacgacggggagtcaggcaactatggatgaacgaaatagacagatcgctgagataggtgcctcactgattaagcattggtaactgtcagaccaagtttactcatatatactttagattgatttaaaacttcatttttaatttaaaaggatctaggtgaagatcctttttgataatctcatgaccaaaatcccttaacgtgagttttcgttccactgagcgtcagaccccgtagaaaagatcaaaggatcttcttgagatcctttttttctgcgcgtaatctgctgcttgcaaacaaaaaaaccaccgctaccagcggtggtttgtttgccggatcaagagctaccaactctttttccgaaggtaactggcttcagcagagcgcagataccaaatactgtccttctagtgtagccgtagttaggccaccacttcaagaactctgtagcaccgcctacatacctcgctctgctaatcctgttaccagtggctgctgccagtggcgataagtcgtgtcttaccgggttggactcaagacgatagttaccggataaggcgcagcggtcgggctgaacggggggttcgtgcacacagcccagcttggagcgaacgacctacaccgaactgagatacctacagcgtgagctatgagaaagcgccacgcttcccgaagggagaaaggcggacaggtatccggtaagcggcagggtcggaacaggagagcgcacgagggagcttccagggggaaacgcctggtatctttatagtcctgtcgggtttcgccacctctgacttgagcgtcgatttttgtgatgctcgtcaggggggcggagcctatggaaaaacgccagcaacgcggcctttttacggttcctggccttttgctggccttttgctcacatgttctttcctgcgttatcccctgattctgtggataaccgtattaccgcctttgagtgagctgataccgctcgccgcagccgaacgaccgagcgcagcgagtcagtgagcgaggaagcggaagagcgcccaatacgcaaaccgcctctccccgcgcgttggccgattcattaatgcagctggcacgacaggtttcccgactggaaagcgggcagtgagcgcaacgcaattaatgtgagttagctcactcattaggcaccccaggctttacactttatgcttccggctcgtatgttgtgtggaattgtgagcggataacaatttcacacaggaaacagcatatgcaaacaagcattactctgacatccaacgcatccggtacgtttgacggttactattacgaactctggaaggatactggcaatacaacaatgacggtctacactcaaggtcgcttttcctgccagtggtcgaacatcaataacgcgttgtttaggaccgggaagaaatacaaccagaattggcagtctcttggcacaatccggatcacgtactctgcgacttacaacccaaacgggaactcctacttgtgtatctatggctggtctaccaacccattggtcgagttctacatcgttgagtcctgggggaactggagaccgcctggtgcctgcttcgatggcaagacaaagattctcacaaatcaggggttcatgacgctgcggcaggtttacgagcagggctacgaggggctctcaacgctgtcactcaacaccaagacgcacaagatcgagtggaagccaattctggacaccatgaagcgccagtccgagatgatcgatatttccgttagccagactggcaggatcaccgacaacacgctgcggctcacccctgatcataagatggtcaatctcaggggcgggaagtacacaaagactgagatccaggacctcctgaagcagcaggagatgctgactgtggcccagaccatcccgagcctcggcaacaataagcaccaggaggcggacctggcttacttcctcggcgggatcattacggatggctcgatctacacatccagcactcggggggaggtccagttcatccagaaggacgttccggagaagcaggctttcatttcgaagatgaacgatctggccaattcgctctacggcaagtctttcacggcgcacatcaagcccgtgtcgtcttcatacattaggggccagaaggtcacggggcaggctacagcgtacaggctgcattccaaggctatcgcctacgacgtcaaggagcgcgagaacaatattacacagctcctgctggagaacgaggctgagctgtcttaccatttcctcggcggcgtgatcgacggcgatgggtgctaccacaagaacaggctccatatctacatttcagaggagaatctgctccaggccgtcatcattgcgtgcctgaagatgaatactgtgccgcaggtcaccaagaaccggaatatctaccacctccagattgtggagaagctggaggtcatcctccggtacacccagcgcgtcaagggcgaggttacccccaggacgatccagacacggttcttcgcgacgcgccagctgttcgagaaccaggagacaggccagatcaagctccggcaggacaacaattgcctgatttctgataagcagctccgcgagatgggcgagttcgaggagctgatcgacggggatactcgcatgcagagggttattcaagtgggcgagaagagcgacggggatgtttacaacatcaccgtggcggagcatcataactacgtcgttttcacagccaagtacacaccagtcgtcgtttgcaacacgtccctgggccaagtgacaatcgatggcgggacctacgacatctataggacgacacgcgtcaaccagccttccattgtggggacagccacgttcgatcagtactggagcgtgcgcacctctaagcggacttcaggaacagtgaccgtgaccgatcacttccgcgcctgggcgaaccggggcctgaacctcggcacaatagaccaaattacattgtgcgtggagggttaccaaagctctggatcagccaacatcacccagaacaccttctctcagggctcttcttccggcagttcgggtggctcatccggctccacaacgactactcgcatcgagtgtgagaacatgtccttgtccggaccctacgttagcaggatcaccaatccctttaatggtattgcgctgtacgccaacggagacacagcccgcgctaccgttaacttccccgcaagtcgcaactacaatttccgcctgcggggttgcggcaacaacaataatcttgcccgtgtggacctgaggatcgacggacggaccgtcgggaccttttattaccagggcacatacccctgggaggccccaattgacaatgtttatgtcagtgcggggagtcatacagtcgaaatcactgttactgcggataacggcacatgggacgtgtatgccgactacctggtgatacagtgactcgagggggggcccggtacccaattcgccctatagtgagtcgtattacaattcactggccgtcgttttacaacgtcgtgactgggaaaaccctggcgttacccaacttaatcgccttgcagcacatccccctttcgccagctggcgtaatagcgaagaggcccgcaccgatcgcccttcccaacagttgcgcagcctgaatggcgaatggaaattgtaagcgttaatattttgttaaaattcgcgttaaatttttgttaaatcagctcattttttaaccaataggccgaaatcggcaaaatcccttataaatcaaaagaatagaccgagatagggttgagtgttgttccagtttggaacaagagtccactattaaagaacgtggactccaacgtcaaagggcgaaaaaccgtctatcagggcgatggcccactacgtgaaccatcaccctaatcaagttttttggggtcgaggtgccgtaaagcactaaatcggaaccctaaagggagcccccgatttagagcttgacggggaaagccggcgaacgtggcgagaaaggaagggaagaaagcgaaaggagcgggcgctagggcgctggcaagtgtagcggtcacgctgcgcgtaaccaccacacccgccgcgcttaatgcgccgctacagggcgcgtcaggtg

SEQ ID NO: 3176 - DNA, 4871 bp, Artificial Sequence
  Synthetic Construct, AT-19 intein modified protein encoding nucleic acids in pBluescript
gcacttttcggggaaatgtgcgcggaacccctatttgtttatttttctaaatacattcaaatatgtatccgctcatgagacaataaccctgataaatgcttcaataatattgaaaaaggaagagtatgagtattcaacatttccgtgtcgcccttattcccttttttgcggcattttgccttcctgtttttgctcacccagaaacgctggtgaaagtaaaagatgctgaagatcagttgggtgcacgagtgggttacatcgaactggatctcaacagcggtaagatccttgagagttttcgccccgaagaacgttttccaatgatgagcacttttaaagttctgctatgtggcgcggtattatcccgtattgacgccgggcaagagcaactcggtcgccgcatacactattctcagaatgacttggttgagtactcaccagtcacagaaaagcatcttacggatggcatgacagtaagagaattatgcagtgctgccataaccatgagtgataacactgcggccaacttacttctgacaacgatcggaggaccgaaggagctaaccgcttttttgcacaacatgggggatcatgtaactcgccttgatcgttgggaaccggagctgaatgaagccataccaaacgacgagcgtgacaccacgatgcctgtagcaatggcaacaacgttgcgcaaactattaactggcgaactacttactctagcttcccggcaacaattaatagactggatggaggcggataaagttgcaggaccacttctgcgctcggcccttccggctggctggtttattgctgataaatctggagccggtgagcgtgggtctcgcggtatcattgcagcactggggccagatggtaagccctcccgtatcgtagttatctacacgacggggagtcaggcaactatggatgaacgaaatagacagatcgctgagataggtgcctcactgattaagcattggtaactgtcagaccaagtttactcatatatactttagattgatttaaaacttcatttttaatttaaaaggatctaggtgaagatcctttttgataatctcatgaccaaaatcccttaacgtgagttttcgttccactgagcgtcagaccccgtagaaaagatcaaaggatcttcttgagatcctttttttctgcgcgtaatctgctgcttgcaaacaaaaaaaccaccgctaccagcggtggtttgtttgccggatcaagagctaccaactctttttccgaaggtaactggcttcagcagagcgcagataccaaatactgtccttctagtgtagccgtagttaggccaccacttcaagaactctgtagcaccgcctacatacctcgctctgctaatcctgttaccagtggctgctgccagtggcgataagtcgtgtcttaccgggttggactcaagacgatagttaccggataaggcgcagcggtcgggctgaacggggggttcgtgcacacagcccagcttggagcgaacgacctacaccgaactgagatacctacagcgtgagctatgagaaagcgccacgcttcccgaagggagaaaggcggacaggtatccggtaagcggcagggtcggaacaggagagcgcacgagggagcttccagggggaaacgcctggtatctttatagtcctgtcgggtttcgccacctctgacttgagcgtcgatttttgtgatgctcgtcaggggggcggagcctatggaaaaacgccagcaacgcggcctttttacggttcctggccttttgctggccttttgctcacatgttctttcctgcgttatcccctgattctgtggataaccgtattaccgcctttgagtgagctgataccgctcgccgcagccgaacgaccgagcgcagcgagtcagtgagcgaggaagcggaagagcgcccaatacgcaaaccgcctctccccgcgcgttggccgattcattaatgcagctggcacgacaggtttcccgactggaaagcgggcagtgagcgcaacgcaattaatgtgagttagctcactcattaggcaccccaggctttacactttatgcttccggctcgtatgttgtgtggaattgtgagcggataacaatttcacacaggaaacagcatatgcaaacaagcattactctgacatccaacgcatccggtacgtttgacggttactattacgaactctggaaggatactggcaatacaacaatgacggtctacactcaaggtcgcttttcctgccagtggtcgaacatcaataacgcgttgtttaggaccgggaagaaatacaaccagaattggcagtctcttggcacaatccggatcacgtactctgcgacttacaacccaaacgggaactcctacttgtgtatctatggctggtctaccaacccattggtcgagttctacatcgttgagtcctgggggaactggagaccgcctggtgcctgcgtcgcgccggagacaaagatcctcacagacagggggcagatcgccatcgctgacgtcgcgggggagaaggtcaatatttggaacgggtcggagtggtctgaggttctcgtgaagaagacaggcgagaaccagccgctcctgaaggtgcacttctcaaatggcgagtccctggactgcacttactaccacaagttccatgtccaggagaactacaaggggaaggtcaagatcgttgaggctaaggacctccaggagggcgataagctgattaagtaccggctcccactggtggagtccgagaatgacatcgatttcccttacgcctacaccagcggcttcttctcgggcgacgggtctcatgatggcatggggaagccggagattgacctctacggcgagaagaaggagctcctgcccttcgtcacggttaggaacaagtactacggcgggtcatacggcgacaagtcctggcgcatcgagagggatgaggtggccgtctacgacgatgttaaccaggaccggatcgtgtgcaagctcccgctggatattcccgcgaagttcacagttcccgtgaatggctacactatccagagcaggctggagtggctggctggcctcctggacgcggatgggacagtcgctaggaacggcgacaatgagagcctgcaggttgcgtcgacccaccagcagttcctcctggacatccgcctcatgctgcagacgctcggcgtcgactctaaggtggtcaagatggatgagatggggtacaggtcgctgccagacggcaagggcgggtaccaggattacttctgccaggcgaagtaccgcctcctgatttccagcaacggcctcttccagctgggcgagctcgggctgaagaccaacaggctccagtggaatctgagggagcctcagagggaggcttcccagttcatcagggtggagaaggtcgagctcacctgccggtacgacgatacgtactgcttctcagagccaaagaggcatctcggcatgttcaatggcatcctcacagggcagacgtccctgggccaagtgacaatcgatggcgggacctacgacatctataggacgacacgcgtcaaccagccttccattgtggggacagccacgttcgatcagtactggagcgtgcgcacctctaagcggacttcaggaacagtgaccgtgaccgatcacttccgcgcctgggcgaaccggggcctgaacctcggcacaatagaccaaattacattgtgcgtggagggttaccaaagctctggatcagccaacatcacccagaacaccttctctcagggctcttcttccggcagttcgggtggctcatccggctccacaacgactactcgcatcgagtgtgagaacatgtccttgtccggaccctacgttagcaggatcaccaatccctttaatggtattgcgctgtacgccaacggagacacagcccgcgctaccgttaacttccccgcaagtcgcaactacaatttccgcctgcggggttgcggcaacaacaataatcttgcccgtgtggacctgaggatcgacggacggaccgtcgggaccttttattaccagggcacatacccctgggaggccccaattgacaatgtttatgtcagtgcggggagtcatacagtcgaaatcactgttactgcggataacggcacatgggacgtgtatgccgactacctggtgatacagtgactcgagggggggcccggtacccaattcgccctatagtgagtcgtattacaattcactggccgtcgttttacaacgtcgtgactgggaaaaccctggcgttacccaacttaatcgccttgcagcacatccccctttcgccagctggcgtaatagcgaagaggcccgcaccgatcgcccttcccaacagttgcgcagcctgaatggcgaatggaaattgtaagcgttaatattttgttaaaattcgcgttaaatttttgttaaatcagctcattttttaaccaataggccgaaatcggcaaaatcccttataaatcaaaagaatagaccgagatagggttgagtgttgttccagtttggaacaagagtccactattaaagaacgtggactccaacgtcaaagggcgaaaaaccgtctatcagggcgatggcccactacgtgaaccatcaccctaatcaagttttttggggtcgaggtgccgtaaagcactaaatcggaaccctaaagggagcccccgatttagagcttgacggggaaagccggcgaacgtggcgagaaaggaagggaagaaagcgaaaggagcgggcgctagggcgctggcaagtgtagcggtcacgctgcgcgtaaccaccacacccgccgcgcttaatgcgccgctacagggcgcgtcaggtg

SEQ ID NO: 3177 - DNA, 5651 bp, Artificial Sequence
  Synthetic Construct, AT-20 intein modified protein encoding nucleic acids in pBluescript
gcacttttcggggaaatgtgcgcggaacccctatttgtttatttttctaaatacattcaaatatgtatccgctcatgagacaataaccctgataaatgcttcaataatattgaaaaaggaagagtatgagtattcaacatttccgtgtcgcccttattcccttttttgcggcattttgccttcctgtttttgctcacccagaaacgctggtgaaagtaaaagatgctgaagatcagttgggtgcacgagtgggttacatcgaactggatctcaacagcggtaagatccttgagagttttcgccccgaagaacgttttccaatgatgagcacttttaaagttctgctatgtggcgcggtattatcccgtattgacgccgggcaagagcaactcggtcgccgcatacactattctcagaatgacttggttgagtactcaccagtcacagaaaagcatcttacggatggcatgacagtaagagaattatgcagtgctgccataaccatgagtgataacactgcggccaacttacttctgacaacgatcggaggaccgaaggagctaaccgcttttttgcacaacatgggggatcatgtaactcgccttgatcgttgggaaccggagctgaatgaagccataccaaacgacgagcgtgacaccacgatgcctgtagcaatggcaacaacgttgcgcaaactattaactggcgaactacttactctagcttcccggcaacaattaatagactggatggaggcggataaagttgcaggaccacttctgcgctcggcccttccggctggctggtttattgctgataaatctggagccggtgagcgtgggtctcgcggtatcattgcagcactggggccagatggtaagccctcccgtatcgtagttatctacacgacggggagtcaggcaactatggatgaacgaaatagacagatcgctgagataggtgcctcactgattaagcattggtaactgtcagaccaagtttactcatatatactttagattgatttaaaacttcatttttaatttaaaaggatctaggtgaagatcctttttgataatctcatgaccaaaatcccttaacgtgagttttcgttccactgagcgtcagaccccgtagaaaagatcaaaggatcttcttgagatcctttttttctgcgcgtaatctgctgcttgcaaacaaaaaaaccaccgctaccagcggtggtttgtttgccggatcaagagctaccaactctttttccgaaggtaactggcttcagcagagcgcagataccaaatactgtccttctagtgtagccgtagttaggccaccacttcaagaactctgtagcaccgcctacatacctcgctctgctaatcctgttaccagtggctgctgccagtggcgataagtcgtgtcttaccgggttggactcaagacgatagttaccggataaggcgcagcggtcgggctgaacggggggttcgtgcacacagcccagcttggagcgaacgacctacaccgaactgagatacctacagcgtgagctatgagaaagcgccacgcttcccgaagggagaaaggcggacaggtatccggtaagcggcagggtcggaacaggagagcgcacgagggagcttccagggggaaacgcctggtatctttatagtcctgtcgggtttcgccacctctgacttgagcgtcgatttttgtgatgctcgtcaggggggcggagcctatggaaaaacgccagcaacgcggcctttttacggttcctggccttttgctggccttttgctcacatgttctttcctgcgttatcccctgattctgtggataaccgtattaccgcctttgagtgagctgataccgctcgccgcagccgaacgaccgagcgcagcgagtcagtgagcgaggaagcggaagagcgcccaatacgcaaaccgcctctccccgcgcgttggccgattcattaatgcagctggcacgacaggtttcccgactggaaagcgggcagtgagcgcaacgcaattaatgtgagttagctcactcattaggcaccccaggctttacactttatgcttccggctcgtatgttgtgtggaattgtgagcggataacaatttcacacaggaaacagcatatgcaaacaagcattactctgacatccaacgcatccggtacgtttgacggttactattacgaactctggaaggatactggcaatacaacaatgacggtctacactcaaggtcgcttttcctgccagtggtcgaacatcaataacgcgttgtttaggaccgggaagaaatacaaccagaattggcagtctcttggcacaatccggatcacgtactctgcgacttacaacccaaacgggaactcctacttgtgtatctatggctggtctaccaacccattggtcgagttctacatcgttgagtcctgggggaactggagaccgcctggtgcctgcctcgcttcggacactctcgttcgcacatcggagggggacaagccagtcgctgaggtcgctatcggggactacctgctggacgctgaggacaagccagtcctctgcatgggcgctaacccttcccagaccgggcgcatgaaggagatcgcttaccaggacttcgattcgaagaagagggtgtctttcaagtgcacaccggaccaccacctggagctgacactcactgattccactccctccctcagcggcaagtcagtcacctggttctccaggtgcacgggggctcacctcagcgaggaggtgtcggaggtctacctggacaacatggtttcgatcttctacaatgatctggttgactcgacggattctgcggtggacaaggattccattcacgaggccgtggacctggcgctggaggatcactaccataggggcaactctgaccagtactcaatccatctcaatgagtacatcagccggattgccgataaggagctgcagaacgagccggagttcatccgggagtgcattcacgacgccgcgaatcgcttcgtcatcacctccagcggcaacaggaatattaagtcggagtctttcgacgataagctcctgctctcacgctccaggtcgtctacagctgacagcgattcggactacgtgatcactgacgcctccgtccactctcattcaaacaattcatccgtctacctcgcctcaccagactccatgatccctgatggcgctgccaaccgcttcgagaatattgcgtccaagctgaaggagccagtgtgcaactgcggcgggatccggaagattttccgcagcttcggcaccacggaggacgctgagctcgcttactccctgctcctgagcgagcactactacaggctggacccacggttcgtcacagatggctacactttccaggcctcggttgagcagtacgagaacatgtgctctcaggaggtgcagaatatgcacctgaagctctaccgctcacctctcaagttcgtggagagggagcataactccgctgagctgccagtcgacccatacttcctgggcctctggctgggcgatggggacagctcggggacaactatcatgaccacggatcgggagattgtggtctggctcaactcctacgtcgagcgcctgaaccagaataagccggagggctgcttccccctcaagctgaccgagcagctgatctacggcgctgggcacacgtccaagagcgggcatacaactaaggtcgacgttaggaattacaagatctcttcaggcgatgctttcgtgcggtcggggacatactggaacccgattttcgacggcctcaagaagctggggctcctgaacaataagagcgctggcatcccccaggagtacatgaactctgacgagcagaataggctctcagttattgccggcctgatggattccgacgggtgctacgtgaagagccacaacacctaccgcttcacccagctcacggaggaccataagaagatcgtctacgatctgaaggagctcgccctgagctgcggcattaacaccacgggggtcgagctctcggttaagccgctgggcttcaataagcacaagcattctaccgagtatgtggtgtacctcggcaacgggagccagaagttccaggagctcctgctcctgccacggaagaagatggagatcagcaagaagcacgtgtcgctggacgcgcgccctttcacggttagcgacgtggaggatggcgagttccgggctattgaggtttcagggggggttttccagctcgctaataggctcgtggttgctaatacgtccctgggccaagtgacaatcgatggcgggacctacgacatctataggacgacacgcgtcaaccagccttccattgtggggacagccacgttcgatcagtactggagcgtgcgcacctctaagcggacttcaggaacagtgaccgtgaccgatcacttccgcgcctgggcgaaccggggcctgaacctcggcacaatagaccaaattacattgtgcgtggagggttaccaaagctctggatcagccaacatcacccagaacaccttctctcagggctcttcttccggcagttcgggtggctcatccggctccacaacgactactcgcatcgagtgtgagaacatgtccttgtccggaccctacgttagcaggatcaccaatccctttaatggtattgcgctgtacgccaacggagacacagcccgcgctaccgttaacttccccgcaagtcgcaactacaatttccgcctgcggggttgcggcaacaacaataatcttgcccgtgtggacctgaggatcgacggacggaccgtcgggaccttttattaccagggcacatacccctgggaggccccaattgacaatgtttatgtcagtgcggggagtcatacagtcgaaatcactgttactgcggataacggcacatgggacgtgtatgccgactacctggtgatacagtgactcgagggggggcccggtacccaattcgccctatagtgagtcgtattacaattcactggccgtcgttttacaacgtcgtgactgggaaaaccctggcgttacccaacttaatcgccttgcagcacatccccctttcgccagctggcgtaatagcgaagaggcccgcaccgatcgcccttcccaacagttgcgcagcctgaatggcgaatggaaattgtaagcgttaatattttgttaaaattcgcgttaaatttttgttaaatcagctcattttttaaccaataggccgaaatcggcaaaatcccttataaatcaaaagaatagaccgagatagggttgagtgttgttccagtttggaacaagagtccactattaaagaacgtggactccaacgtcaaagggcgaaaaaccgtctatcagggcgatggcccactacgtgaaccatcaccctaatcaagttttttggggtcgaggtgccgtaaagcactaaatcggaaccctaaagggagcccccgatttagagcttgacggggaaagccggcgaacgtggcgagaaaggaagggaagaaagcgaaaggagcgggcgctagggcgctggcaagtgtagcggtcacgctgcgcgtaaccaccacacccgccgcgcttaatgcgccgctacagggcgcgtcaggtg

SEQ ID NO: 3178 - DNA, 4712 bp, Artificial Sequence
  Synthetic Construct, AT-21 intein modified protein encoding nucleic acids in pBluescript
gcacttttcggggaaatgtgcgcggaacccctatttgtttatttttctaaatacattcaaatatgtatccgctcatgagacaataaccctgataaatgcttcaataatattgaaaaaggaagagtatgagtattcaacatttccgtgtcgcccttattcccttttttgcggcattttgccttcctgtttttgctcacccagaaacgctggtgaaagtaaaagatgctgaagatcagttgggtgcacgagtgggttacatcgaactggatctcaacagcggtaagatccttgagagttttcgccccgaagaacgttttccaatgatgagcacttttaaagttctgctatgtggcgcggtattatcccgtattgacgccgggcaagagcaactcggtcgccgcatacactattctcagaatgacttggttgagtactcaccagtcacagaaaagcatcttacggatggcatgacagtaagagaattatgcagtgctgccataaccatgagtgataacactgcggccaacttacttctgacaacgatcggaggaccgaaggagctaaccgcttttttgcacaacatgggggatcatgtaactcgccttgatcgttgggaaccggagctgaatgaagccataccaaacgacgagcgtgacaccacgatgcctgtagcaatggcaacaacgttgcgcaaactattaactggcgaactacttactctagcttcccggcaacaattaatagactggatggaggcggataaagttgcaggaccacttctgcgctcggcccttccggctggctggtttattgctgataaatctggagccggtgagcgtgggtctcgcggtatcattgcagcactggggccagatggtaagccctcccgtatcgtagttatctacacgacggggagtcaggcaactatggatgaacgaaatagacagatcgctgagataggtgcctcactgattaagcattggtaactgtcagaccaagtttactcatatatactttagattgatttaaaacttcatttttaatttaaaaggatctaggtgaagatcctttttgataatctcatgaccaaaatcccttaacgtgagttttcgttccactgagcgtcagaccccgtagaaaagatcaaaggatcttcttgagatcctttttttctgcgcgtaatctgctgcttgcaaacaaaaaaaccaccgctaccagcggtggtttgtttgccggatcaagagctaccaactctttttccgaaggtaactggcttcagcagagcgcagataccaaatactgtccttctagtgtagccgtagttaggccaccacttcaagaactctgtagcaccgcctacatacctcgctctgctaatcctgttaccagtggctgctgccagtggcgataagtcgtgtcttaccgggttggactcaagacgatagttaccggataaggcgcagcggtcgggctgaacggggggttcgtgcacacagcccagcttggagcgaacgacctacaccgaactgagatacctacagcgtgagctatgagaaagcgccacgcttcccgaagggagaaaggcggacaggtatccggtaagcggcagggtcggaacaggagagcgcacgagggagcttccagggggaaacgcctggtatctttatagtcctgtcgggtttcgccacctctgacttgagcgtcgatttttgtgatgctcgtcaggggggcggagcctatggaaaaacgccagcaacgcggcctttttacggttcctggccttttgctggccttttgctcacatgttctttcctgcgttatcccctgattctgtggataaccgtattaccgcctttgagtgagctgataccgctcgccgcagccgaacgaccgagcgcagcgagtcagtgagcgaggaagcggaagagcgcccaatacgcaaaccgcctctccccgcgcgttggccgattcattaatgcagctggcacgacaggtttcccgactggaaagcgggcagtgagcgcaacgcaattaatgtgagttagctcactcattaggcaccccaggctttacactttatgcttccggctcgtatgttgtgtggaattgtgagcggataacaatttcacacaggaaacagcatatgcaaacaagcattactctgacatccaacgcatccggtacgtttgacggttactattacgaactctggaaggatactggcaatacaacaatgacggtctacactcaaggtcgcttttcctgccagtggtcgaacatcaataacgcgttgtttaggaccgggaagaaatacaaccagaattggcagtctcttggcacaatccggatcacgtactctgcgacttacaacccaaacgggaactcctacttgtgtatctatggctggtctaccaacccattggtcgagttctacatcgttgagtcctgggggaactggagaccgcctggtgcctgccagccatacgacgctctcgtttcaacgccatcggggctcgttcctatcggggctctcgtggagacagacgcggtcggcatgaaggtgttcgatgcgcacggcctcacacaggtcattgctactaagagcaacggggttaaggacgtgctgaggatctggacccgcgcgggccacgctctcgacgtcacggccgatcatctggtttggaggtccacaagcgctggcgctggggctttcgtgccagctggcgctctcagggctggggacacactggagtggcataggactattgctccaggcgagggggagatcacgagccgcgagattgctgaggctgctctcgctggcaggctgcaggctgatggcttcgtcgggcgctacgctgggaccaatgcttcgctcacgatcgaggcgatgaccgttccaacgaggctctacgacgctccactgccagtggtcgctgcctacctcaggtcactgttccaggctgatggctacgtctcgcgcagggagaggtctaccctcatcggcctggacatgatttccgaggggctgatcaggggcgttcaggggctcctggctaggttcggcatcttcgccagggtgcggagggaggctgatccacgccctgacaggcacgatctctggtccctgggcattcagaacgctggggacaggcggaccttcgccgatgagatcggcttcctcgacccagtgaaggcggctaagctggaggcttccttcgaccagccaggccaggctgctaagcctgtcaagaggctccagatcgagaggattgagccgaggggcccgatgcccgtctacgacattcagacagattccggggagtacctctctgctgggctcagggttcataacacgtccctgggccaagtgacaatcgatggcgggacctacgacatctataggacgacacgcgtcaaccagccttccattgtggggacagccacgttcgatcagtactggagcgtgcgcacctctaagcggacttcaggaacagtgaccgtgaccgatcacttccgcgcctgggcgaaccggggcctgaacctcggcacaatagaccaaattacattgtgcgtggagggttaccaaagctctggatcagccaacatcacccagaacaccttctctcagggctcttcttccggcagttcgggtggctcatccggctccacaacgactactcgcatcgagtgtgagaacatgtccttgtccggaccctacgttagcaggatcaccaatccctttaatggtattgcgctgtacgccaacggagacacagcccgcgctaccgttaacttccccgcaagtcgcaactacaatttccgcctgcggggttgcggcaacaacaataatcttgcccgtgtggacctgaggatcgacggacggaccgtcgggaccttttattaccagggcacatacccctgggaggccccaattgacaatgtttatgtcagtgcggggagtcatacagtcgaaatcactgttactgcggataacggcacatgggacgtgtatgccgactacctggtgatacagtgactcgagggggggcccggtacccaattcgccctatagtgagtcgtattacaattcactggccgtcgttttacaacgtcgtgactgggaaaaccctggcgttacccaacttaatcgccttgcagcacatccccctttcgccagctggcgtaatagcgaagaggcccgcaccgatcgcccttcccaacagttgcgcagcctgaatggcgaatggaaattgtaagcgttaatattttgttaaaattcgcgttaaatttttgttaaatcagctcattttttaaccaataggccgaaatcggcaaaatcccttataaatcaaaagaatagaccgagatagggttgagtgttgttccagtttggaacaagagtccactattaaagaacgtggactccaacgtcaaagggcgaaaaaccgtctatcagggcgatggcccactacgtgaaccatcaccctaatcaagttttttggggtcgaggtgccgtaaagcactaaatcggaaccctaaagggagcccccgatttagagcttgacggggaaagccggcgaacgtggcgagaaaggaagggaagaaagcgaaaggagcgggcgctagggcgctggcaagtgtagcggtcacgctgcgcgtaaccaccacacccgccgcgcttaatgcgccgctacagggcgcgtcaggtg

SEQ ID NO: 3179 - DNA, 5168 bp, Artificial Sequence
  Synthetic Construct, AT-22 intein modified protein encoding nucleic acids in pBluescript
gcacttttcggggaaatgtgcgcggaacccctatttgtttatttttctaaatacattcaaatatgtatccgctcatgagacaataaccctgataaatgcttcaataatattgaaaaaggaagagtatgagtattcaacatttccgtgtcgcccttattcccttttttgcggcattttgccttcctgtttttgctcacccagaaacgctggtgaaagtaaaagatgctgaagatcagttgggtgcacgagtgggttacatcgaactggatctcaacagcggtaagatccttgagagttttcgccccgaagaacgttttccaatgatgagcacttttaaagttctgctatgtggcgcggtattatcccgtattgacgccgggcaagagcaactcggtcgccgcatacactattctcagaatgacttggttgagtactcaccagtcacagaaaagcatcttacggatggcatgacagtaagagaattatgcagtgctgccataaccatgagtgataacactgcggccaacttacttctgacaacgatcggaggaccgaaggagctaaccgcttttttgcacaacatgggggatcatgtaactcgccttgatcgttgggaaccggagctgaatgaagccataccaaacgacgagcgtgacaccacgatgcctgtagcaatggcaacaacgttgcgcaaactattaactggcgaactacttactctagcttcccggcaacaattaatagactggatggaggcggataaagttgcaggaccacttctgcgctcggcccttccggctggctggtttattgctgataaatctggagccggtgagcgtgggtctcgcggtatcattgcagcactggggccagatggtaagccctcccgtatcgtagttatctacacgacggggagtcaggcaactatggatgaacgaaatagacagatcgctgagataggtgcctcactgattaagcattggtaactgtcagaccaagtttactcatatatactttagattgatttaaaacttcatttttaatttaaaaggatctaggtgaagatcctttttgataatctcatgaccaaaatcccttaacgtgagttttcgttccactgagcgtcagaccccgtagaaaagatcaaaggatcttcttgagatcctttttttctgcgcgtaatctgctgcttgcaaacaaaaaaaccaccgctaccagcggtggtttgtttgccggatcaagagctaccaactctttttccgaaggtaactggcttcagcagagcgcagataccaaatactgtccttctagtgtagccgtagttaggccaccacttcaagaactctgtagcaccgcctacatacctcgctctgctaatcctgttaccagtggctgctgccagtggcgataagtcgtgtcttaccgggttggactcaagacgatagttaccggataaggcgcagcggtcgggctgaacggggggttcgtgcacacagcccagcttggagcgaacgacctacaccgaactgagatacctacagcgtgagctatgagaaagcgccacgcttcccgaagggagaaaggcggacaggtatccggtaagcggcagggtcggaacaggagagcgcacgagggagcttccagggggaaacgcctggtatctttatagtcctgtcgggtttcgccacctctgacttgagcgtcgatttttgtgatgctcgtcaggggggcggagcctatggaaaaacgccagcaacgcggcctttttacggttcctggccttttgctggccttttgctcacatgttctttcctgcgttatcccctgattctgtggataaccgtattaccgcctttgagtgagctgataccgctcgccgcagccgaacgaccgagcgcagcgagtcagtgagcgaggaagcggaagagcgcccaatacgcaaaccgcctctccccgcgcgttggccgattcattaatgcagctggcacgacaggtttcccgactggaaagcgggcagtgagcgcaacgcaattaatgtgagttagctcactcattaggcaccccaggctttacactttatgcttccggctcgtatgttgtgtggaattgtgagcggataacaatttcacacaggaaacagcatatgcaaacaagcattactctgacatccaacgcatccggtacgtttgacggttactattacgaactctggaaggatactggcaatacaacaatgacggtctacactcaaggtcgcttttcctgccagtggtcgaacatcaataacgcgttgtttaggaccgggaagaaatacaaccagaattggcagtctcttggcacaatccggatcacgtactctgcgacttacaacccaaacgggaactcctacttgtgtatctatggctggtctaccaacccattggtcgagttctacatcgttgagtcctgggggaactggagaccgcctggtgcctgcgtggtcgcgggcactgaggtcacagacgctgagacaggggcggtcgttacggtcggggagctcttcgagtcgcggagggcggtcacagtccacgctctcggcgctgacagcaagctgaggccaaggcctgttactgatgtggtctggaacgggcgcaagagggtgtaccgcctcaccacggagctgggcaagtcgatcacagccactgacaaccatcctttccgcgtgctggatggctggaagaatctcggggagctgaagccaggcgacaggatcgctgctccaaggaggctggcggtcccttcggctggcacctggccgcagcacgagattgttgcgctcgctgggctcctgtctgagggcaacacgtgccatcccacaactctctacttctacgggaatgaccgggttctgatcgacgatttcgcgcgggcaattggccagttccccgatacagtcgccaaggtttacgctaggccaaacaggaggaacctggaggtgcgcgctaacacaggcagggacactcgcctgaagtcaagggcggagagggatgctgctgtggctctcctggctccaccaacgaggtccggcgctttcgtctgggctcagaggctcggcatcctggggaagaccgctacggagaagttcgtgcctcacgacgtcttccggctctgcgacagcgatctggagctcttcctgggcaggctgtgggctggcgacgggttcattgctaatgataccctcaaggtcccgttctacgctacgtccagcaggaggctcgctcaggacgtgcagcacctcctgctcaggctgggcatcgtcgggaggattcatgagaagcagttcaagtacaagggcgggctcaagcccggcttcacagtgcacctgatcggcgacggggctgctgaggccttcctcgataggattgctccacactgcctggggagggagcatgctgtcactatcctcagggagcatgttgctaccacggcgaggggcctcacctccaaggacacggttccgctggaggtgcgcgcttgggtcgacgatgggaggagggcgaggggcctcacctgggacgagctggagcagcagtcggatgtctctacacaggagttctacggcactccagctccaggcaagaaggggttccggagggctacgatcgctaagctcgctgcgttcttcggctcacagaggctggctgctgttgctgactccgatgtgttctgggacagggttgtgagcattgagtacgcgggcgtgcaggatacctacgatctcacagtggatgaggatcataatttcgttgctaatgggctcatcgttcacaatacgtccctgggccaagtgacaatcgatggcgggacctacgacatctataggacgacacgcgtcaaccagccttccattgtggggacagccacgttcgatcagtactggagcgtgcgcacctctaagcggacttcaggaacagtgaccgtgaccgatcacttccgcgcctgggcgaaccggggcctgaacctcggcacaatagaccaaattacattgtgcgtggagggttaccaaagctctggatcagccaacatcacccagaacaccttctctcagggctcttcttccggcagttcgggtggctcatccggctccacaacgactactcgcatcgagtgtgagaacatgtccttgtccggaccctacgttagcaggatcaccaatccctttaatggtattgcgctgtacgccaacggagacacagcccgcgctaccgttaacttccccgcaagtcgcaactacaatttccgcctgcggggttgcggcaacaacaataatcttgcccgtgtggacctgaggatcgacggacggaccgtcgggaccttttattaccagggcacatacccctgggaggccccaattgacaatgtttatgtcagtgcggggagtcatacagtcgaaatcactgttactgcggataacggcacatgggacgtgtatgccgactacctggtgatacagtgactcgagggggggcccggtacccaattcgccctatagtgagtcgtattacaattcactggccgtcgttttacaacgtcgtgactgggaaaaccctggcgttacccaacttaatcgccttgcagcacatccccctttcgccagctggcgtaatagcgaagaggcccgcaccgatcgcccttcccaacagttgcgcagcctgaatggcgaatggaaattgtaagcgttaatattttgttaaaattcgcgttaaatttttgttaaatcagctcattttttaaccaataggccgaaatcggcaaaatcccttataaatcaaaagaatagaccgagatagggttgagtgttgttccagtttggaacaagagtccactattaaagaacgtggactccaacgtcaaagggcgaaaaaccgtctatcagggcgatggcccactacgtgaaccatcaccctaatcaagttttttggggtcgaggtgccgtaaagcactaaatcggaaccctaaagggagcccccgatttagagcttgacggggaaagccggcgaacgtggcgagaaaggaagggaagaaagcgaaaggagcgggcgctagggcgctggcaagtgtagcggtcacgctgcgcgtaaccaccacacccgccgcgcttaatgcgccgctacagggcgcgtcaggtg

SEQ ID NO: 3180 - DNA, 4691 bp, Artificial Sequence
  Synthetic Construct, AT-23 intein modified protein encoding nucleic acids in pBluescript
gcacttttcggggaaatgtgcgcggaacccctatttgtttatttttctaaatacattcaaatatgtatccgctcatgagacaataaccctgataaatgcttcaataatattgaaaaaggaagagtatgagtattcaacatttccgtgtcgcccttattcccttttttgcggcattttgccttcctgtttttgctcacccagaaacgctggtgaaagtaaaagatgctgaagatcagttgggtgcacgagtgggttacatcgaactggatctcaacagcggtaagatccttgagagttttcgccccgaagaacgttttccaatgatgagcacttttaaagttctgctatgtggcgcggtattatcccgtattgacgccgggcaagagcaactcggtcgccgcatacactattctcagaatgacttggttgagtactcaccagtcacagaaaagcatcttacggatggcatgacagtaagagaattatgcagtgctgccataaccatgagtgataacactgcggccaacttacttctgacaacgatcggaggaccgaaggagctaaccgcttttttgcacaacatgggggatcatgtaactcgccttgatcgttgggaaccggagctgaatgaagccataccaaacgacgagcgtgacaccacgatgcctgtagcaatggcaacaacgttgcgcaaactattaactggcgaactacttactctagcttcccggcaacaattaatagactggatggaggcggataaagttgcaggaccacttctgcgctcggcccttccggctggctggtttattgctgataaatctggagccggtgagcgtgggtctcgcggtatcattgcagcactggggccagatggtaagccctcccgtatcgtagttatctacacgacggggagtcaggcaactatggatgaacgaaatagacagatcgctgagataggtgcctcactgattaagcattggtaactgtcagaccaagtttactcatatatactttagattgatttaaaacttcatttttaatttaaaaggatctaggtgaagatcctttttgataatctcatgaccaaaatcccttaacgtgagttttcgttccactgagcgtcagaccccgtagaaaagatcaaaggatcttcttgagatcctttttttctgcgcgtaatctgctgcttgcaaacaaaaaaaccaccgctaccagcggtggtttgtttgccggatcaagagctaccaactctttttccgaaggtaactggcttcagcagagcgcagataccaaatactgtccttctagtgtagccgtagttaggccaccacttcaagaactctgtagcaccgcctacatacctcgctctgctaatcctgttaccagtggctgctgccagtggcgataagtcgtgtcttaccgggttggactcaagacgatagttaccggataaggcgcagcggtcgggctgaacggggggttcgtgcacacagcccagcttggagcgaacgacctacaccgaactgagatacctacagcgtgagctatgagaaagcgccacgcttcccgaagggagaaaggcggacaggtatccggtaagcggcagggtcggaacaggagagcgcacgagggagcttccagggggaaacgcctggtatctttatagtcctgtcgggtttcgccacctctgacttgagcgtcgatttttgtgatgctcgtcaggggggcggagcctatggaaaaacgccagcaacgcggcctttttacggttcctggccttttgctggccttttgctcacatgttctttcctgcgttatcccctgattctgtggataaccgtattaccgcctttgagtgagctgataccgctcgccgcagccgaacgaccgagcgcagcgagtcagtgagcgaggaagcggaagagcgcccaatacgcaaaccgcctctccccgcgcgttggccgattcattaatgcagctggcacgacaggtttcccgactggaaagcgggcagtgagcgcaacgcaattaatgtgagttagctcactcattaggcaccccaggctttacactttatgcttccggctcgtatgttgtgtggaattgtgagcggataacaatttcacacaggaaacagcatatgcaaacaagcattactctgacatccaacgcatccggtacgtttgacggttactattacgaactctggaaggatactggcaatacaacaatgacggtctacactcaaggtcgcttttcctgccagtggtcgaacatcaataacgcgttgtttaggaccgggaagaaatacaaccagaattggcagtctcttggcacaatccggatcacgtactctgcgacttacaacccaaacgggaactcctacttgtgtatctatggctggtctaccaacccattggtcgagttctacatcgttgagtcctgggggaactggagaccgcctggtgcctgccagcctgcggggacacaggtcgctaaggttattaaggaggggaggtggagggaggattcggttattgagcaggttcctattgagtcactccagccaggcgacagggtggtctccttcgggaacgcgaagatctaccgcaggggccgcgctgtgacagggattacttcccggcgccacacaggcaatctgcatagggtcgaggttggggagttccgcaccagggccacgccagagcacaggttcaccgtccggttcgacccagctaggcctaaggctggcctcctgtacctcatgaggaggggcgataggtggagggtgggcgtctgcgggatgttcaactcgcgcggcttcggggtttccgtgcggctgagccaggagaggggcgacgctgcttgggtgctcggggccttcgcgacactgactgaggctaggatcgccgagcaggttgtgagctgccggtacggcattccaaccacggtctgggagaccggcaggaatcctggggcttcgtgggctcagagggaccaggctggcatcgatgccatctaccagaggctcggcgtcgataggatccgggctggggttgacaggctcctgagggatcacggcctctctgctgggctgccactcctggctgccaacgagcccggcaatttctcgtgcaggcagtctaggcaggtggctgcttgcaacctggtgccaggcgtcatgcaggtcccagttccaacggctggcgagaggttcgagtggagggacctcaccgctacgagcttcgagagggttcatgatctggaggtgtggagcatggatgtggagagggataagcattacgttgcggatggcatcgttgtgcataacacgtccctgggccaagtgacaatcgatggcgggacctacgacatctataggacgacacgcgtcaaccagccttccattgtggggacagccacgttcgatcagtactggagcgtgcgcacctctaagcggacttcaggaacagtgaccgtgaccgatcacttccgcgcctgggcgaaccggggcctgaacctcggcacaatagaccaaattacattgtgcgtggagggttaccaaagctctggatcagccaacatcacccagaacaccttctctcagggctcttcttccggcagttcgggtggctcatccggctccacaacgactactcgcatcgagtgtgagaacatgtccttgtccggaccctacgttagcaggatcaccaatccctttaatggtattgcgctgtacgccaacggagacacagcccgcgctaccgttaacttccccgcaagtcgcaactacaatttccgcctgcggggttgcggcaacaacaataatcttgcccgtgtggacctgaggatcgacggacggaccgtcgggaccttttattaccagggcacatacccctgggaggccccaattgacaatgtttatgtcagtgcggggagtcatacagtcgaaatcactgttactgcggataacggcacatgggacgtgtatgccgactacctggtgatacagtgactcgagggggggcccggtacccaattcgccctatagtgagtcgtattacaattcactggccgtcgttttacaacgtcgtgactgggaaaaccctggcgttacccaacttaatcgccttgcagcacatccccctttcgccagctggcgtaatagcgaagaggcccgcaccgatcgcccttcccaacagttgcgcagcctgaatggcgaatggaaattgtaagcgttaatattttgttaaaattcgcgttaaatttttgttaaatcagctcattttttaaccaataggccgaaatcggcaaaatcccttataaatcaaaagaatagaccgagatagggttgagtgttgttccagtttggaacaagagtccactattaaagaacgtggactccaacgtcaaagggcgaaaaaccgtctatcagggcgatggcccactacgtgaaccatcaccctaatcaagttttttggggtcgaggtgccgtaaagcactaaatcggaaccctaaagggagcccccgatttagagcttgacggggaaagccggcgaacgtggcgagaaaggaagggaagaaagcgaaaggagcgggcgctagggcgctggcaagtgtagcggtcacgctgcgcgtaaccaccacacccgccgcgcttaatgcgccgctacagggcgcgtcaggtg

SEQ ID NO: 3181 - DNA, 5066 bp, Artificial Sequence
  Synthetic Construct, AT-24 intein modified protein encoding nucleic acids in pBluescript
gcacttttcggggaaatgtgcgcggaacccctatttgtttatttttctaaatacattcaaatatgtatccgctcatgagacaataaccctgataaatgcttcaataatattgaaaaaggaagagtatgagtattcaacatttccgtgtcgcccttattcccttttttgcggcattttgccttcctgtttttgctcacccagaaacgctggtgaaagtaaaagatgctgaagatcagttgggtgcacgagtgggttacatcgaactggatctcaacagcggtaagatccttgagagttttcgccccgaagaacgttttccaatgatgagcacttttaaagttctgctatgtggcgcggtattatcccgtattgacgccgggcaagagcaactcggtcgccgcatacactattctcagaatgacttggttgagtactcaccagtcacagaaaagcatcttacggatggcatgacagtaagagaattatgcagtgctgccataaccatgagtgataacactgcggccaacttacttctgacaacgatcggaggaccgaaggagctaaccgcttttttgcacaacatgggggatcatgtaactcgccttgatcgttgggaaccggagctgaatgaagccataccaaacgacgagcgtgacaccacgatgcctgtagcaatggcaacaacgttgcgcaaactattaactggcgaactacttactctagcttcccggcaacaattaatagactggatggaggcggataaagttgcaggaccacttctgcgctcggcccttccggctggctggtttattgctgataaatctggagccggtgagcgtgggtctcgcggtatcattgcagcactggggccagatggtaagccctcccgtatcgtagttatctacacgacggggagtcaggcaactatggatgaacgaaatagacagatcgctgagataggtgcctcactgattaagcattggtaactgtcagaccaagtttactcatatatactttagattgatttaaaacttcatttttaatttaaaaggatctaggtgaagatcctttttgataatctcatgaccaaaatcccttaacgtgagttttcgttccactgagcgtcagaccccgtagaaaagatcaaaggatcttcttgagatcctttttttctgcgcgtaatctgctgcttgcaaacaaaaaaaccaccgctaccagcggtggtttgtttgccggatcaagagctaccaactctttttccgaaggtaactggcttcagcagagcgcagataccaaatactgtccttctagtgtagccgtagttaggccaccacttcaagaactctgtagcaccgcctacatacctcgctctgctaatcctgttaccagtggctgctgccagtggcgataagtcgtgtcttaccgggttggactcaagacgatagttaccggataaggcgcagcggtcgggctgaacggggggttcgtgcacacagcccagcttggagcgaacgacctacaccgaactgagatacctacagcgtgagctatgagaaagcgccacgcttcccgaagggagaaaggcggacaggtatccggtaagcggcagggtcggaacaggagagcgcacgagggagcttccagggggaaacgcctggtatctttatagtcctgtcgggtttcgccacctctgacttgagcgtcgatttttgtgatgctcgtcaggggggcggagcctatggaaaaacgccagcaacgcggcctttttacggttcctggccttttgctggccttttgctcacatgttctttcctgcgttatcccctgattctgtggataaccgtattaccgcctttgagtgagctgataccgctcgccgcagccgaacgaccgagcgcagcgagtcagtgagcgaggaagcggaagagcgcccaatacgcaaaccgcctctccccgcgcgttggccgattcattaatgcagctggcacgacaggtttcccgactggaaagcgggcagtgagcgcaacgcaattaatgtgagttagctcactcattaggcaccccaggctttacactttatgcttccggctcgtatgttgtgtggaattgtgagcggataacaatttcacacaggaaacagcatatgcaaacaagcattactctgacatccaacgcatccggtacgtttgacggttactattacgaactctggaaggatactggcaatacaacaatgacggtctacactcaaggtcgcttttcctgccagtggtcgaacatcaataacgcgttgtttaggaccgggaagaaatacaaccagaattggcagtctcttggcacaatccggatcacgtactctgcgacttacaacccaaacgggaactcctacttgtgtatctatggctggtctaccaacccattggtcgagttctacatcgttgagtcctgggggaactggagaccgcctggtgcctgcttcgctgcggggacgctgctgcatactgagcagggctacgttccggtggagcaggtcgtggcgggggtcgggacaagggtttgcacacaccagggcttccggaacatctctgagcgcttcgataatggggaggccgaggttttcagggtgaccacgcggaagggctactccgtggaggtcactgcgaaccacaagatggctcgcctcgacgagaatggcgatctcctgctcgacgagctctcacatctgcaagtgggcgacaacctgctcctgctcctggggtccaatccggtgaccgagaaggtccggctgcagtgcatcccagctggctaccgctccagcatcgagattgctcagccgcccgagctcgatgagcagctggcttacctcctgggctacgcctacggcgacgggtgcgtcggcaggggggctacatacaactacctcagcctggctgtgtcgcacacttacccgaatgtccgcgaccagctcgccgcgatcattagggagaagttcggcctgacaactaagatctactcaggctccggggcggtttggaacctcctggtgcattccgccaatctcctggattggctcaaggcgaacggcctcctgaagcagaaggctgcggacctcgccatgccagaggcgattctgcgctcgccttcgtctgtggtcggcgctttcctgtctgggtacttcgacgctgatggctgcgtgaggggcgggaagggcgggtacgggttcgattgcacgagcaaggctttcgtcggcgctgttcagctcctgctcctggccgaggggatcgtgtccaacctccacaccacggaccggagccgccagggctggcgcacaatctacaggctcaatgtctgcggcaccgagttcaagcgcaggttccagacgctgtgctgcaggtctgcgaaggttgtgcattcaccaatggtgctcggcagggatgggaccggcgggtacccacctgctctggttaggggcgcttcgtaccagagggtcgttgctgtcggcgggaagcacctcctgtacacggcgctcctgaaggtcatcgagaagacaaggactgctggcaagcaggctctcgctgagagcctgtgccagcatgtcaactacttcccggaccccatcgtcgcgattgagtcggttggcacgcagagggtttacgatattgaggtggagggcatgcatctgctcggcaatggcatctacacaagcaacacgtccctgggccaagtgacaatcgatggcgggacctacgacatctataggacgacacgcgtcaaccagccttccattgtggggacagccacgttcgatcagtactggagcgtgcgcacctctaagcggacttcaggaacagtgaccgtgaccgatcacttccgcgcctgggcgaaccggggcctgaacctcggcacaatagaccaaattacattgtgcgtggagggttaccaaagctctggatcagccaacatcacccagaacaccttctctcagggctcttcttccggcagttcgggtggctcatccggctccacaacgactactcgcatcgagtgtgagaacatgtccttgtccggaccctacgttagcaggatcaccaatccctttaatggtattgcgctgtacgccaacggagacacagcccgcgctaccgttaacttccccgcaagtcgcaactacaatttccgcctgcggggttgcggcaacaacaataatcttgcccgtgtggacctgaggatcgacggacggaccgtcgggaccttttattaccagggcacatacccctgggaggccccaattgacaatgtttatgtcagtgcggggagtcatacagtcgaaatcactgttactgcggataacggcacatgggacgtgtatgccgactacctggtgatacagtgactcgagggggggcccggtacccaattcgccctatagtgagtcgtattacaattcactggccgtcgttttacaacgtcgtgactgggaaaaccctggcgttacccaacttaatcgccttgcagcacatccccctttcgccagctggcgtaatagcgaagaggcccgcaccgatcgcccttcccaacagttgcgcagcctgaatggcgaatggaaattgtaagcgttaatattttgttaaaattcgcgttaaatttttgttaaatcagctcattttttaaccaataggccgaaatcggcaaaatcccttataaatcaaaagaatagaccgagatagggttgagtgttgttccagtttggaacaagagtccactattaaagaacgtggactccaacgtcaaagggcgaaaaaccgtctatcagggcgatggcccactacgtgaaccatcaccctaatcaagttttttggggtcgaggtgccgtaaagcactaaatcggaaccctaaagggagcccccgatttagagcttgacggggaaagccggcgaacgtggcgagaaaggaagggaagaaagcgaaaggagcgggcgctagggcgctggcaagtgtagcggtcacgctgcgcgtaaccaccacacccgccgcgcttaatgcgccgctacagggcgcgtcaggtg

SEQ ID NO: 3182 - DNA, 5306 bp, Artificial Sequence
  Synthetic Construct, AT-25 intein modified protein encoding nucleic acids in pBluescript
gcacttttcggggaaatgtgcgcggaacccctatttgtttatttttctaaatacattcaaatatgtatccgctcatgagacaataaccctgataaatgcttcaataatattgaaaaaggaagagtatgagtattcaacatttccgtgtcgcccttattcccttttttgcggcattttgccttcctgtttttgctcacccagaaacgctggtgaaagtaaaagatgctgaagatcagttgggtgcacgagtgggttacatcgaactggatctcaacagcggtaagatccttgagagttttcgccccgaagaacgttttccaatgatgagcacttttaaagttctgctatgtggcgcggtattatcccgtattgacgccgggcaagagcaactcggtcgccgcatacactattctcagaatgacttggttgagtactcaccagtcacagaaaagcatcttacggatggcatgacagtaagagaattatgcagtgctgccataaccatgagtgataacactgcggccaacttacttctgacaacgatcggaggaccgaaggagctaaccgcttttttgcacaacatgggggatcatgtaactcgccttgatcgttgggaaccggagctgaatgaagccataccaaacgacgagcgtgacaccacgatgcctgtagcaatggcaacaacgttgcgcaaactattaactggcgaactacttactctagcttcccggcaacaattaatagactggatggaggcggataaagttgcaggaccacttctgcgctcggcccttccggctggctggtttattgctgataaatctggagccggtgagcgtgggtctcgcggtatcattgcagcactggggccagatggtaagccctcccgtatcgtagttatctacacgacggggagtcaggcaactatggatgaacgaaatagacagatcgctgagataggtgcctcactgattaagcattggtaactgtcagaccaagtttactcatatatactttagattgatttaaaacttcatttttaatttaaaaggatctaggtgaagatcctttttgataatctcatgaccaaaatcccttaacgtgagttttcgttccactgagcgtcagaccccgtagaaaagatcaaaggatcttcttgagatcctttttttctgcgcgtaatctgctgcttgcaaacaaaaaaaccaccgctaccagcggtggtttgtttgccggatcaagagctaccaactctttttccgaaggtaactggcttcagcagagcgcagataccaaatactgtccttctagtgtagccgtagttaggccaccacttcaagaactctgtagcaccgcctacatacctcgctctgctaatcctgttaccagtggctgctgccagtggcgataagtcgtgtcttaccgggttggactcaagacgatagttaccggataaggcgcagcggtcgggctgaacggggggttcgtgcacacagcccagcttggagcgaacgacctacaccgaactgagatacctacagcgtgagctatgagaaagcgccacgcttcccgaagggagaaaggcggacaggtatccggtaagcggcagggtcggaacaggagagcgcacgagggagcttccagggggaaacgcctggtatctttatagtcctgtcgggtttcgccacctctgacttgagcgtcgatttttgtgatgctcgtcaggggggcggagcctatggaaaaacgccagcaacgcggcctttttacggttcctggccttttgctggccttttgctcacatgttctttcctgcgttatcccctgattctgtggataaccgtattaccgcctttgagtgagctgataccgctcgccgcagccgaacgaccgagcgcagcgagtcagtgagcgaggaagcggaagagcgcccaatacgcaaaccgcctctccccgcgcgttggccgattcattaatgcagctggcacgacaggtttcccgactggaaagcgggcagtgagcgcaacgcaattaatgtgagttagctcactcattaggcaccccaggctttacactttatgcttccggctcgtatgttgtgtggaattgtgagcggataacaatttcacacaggaaacagcatatgcaaacaagcattactctgacatccaacgcatccggtacgtttgacggttactattacgaactctggaaggatactggcaatacaacaatgacggtctacactcaaggtcgcttttcctgccagtggtcgaacatcaataacgcgttgtttaggaccgggaagaaatacaaccagaattggcagtctcttggcacaatccggatcacgtactctgcgacttacaacccaaacgggaactcctacttgtgtatctatggctggtctaccaacccattggtcgagttctacatcgttgagtcctgggggaactggagaccgcctggtgcctgcctcgcctacgacgcggagatcgttcaggctgacgggggggttaagactattgagcagatcgttagggagcggcgggcgcatctcgctacggtcggcgctgactggaggctgacatggactgagccgtgcgattacgttgacgatggccacaagcccgtcttcgaggttaccacgcgcctcgggcgcaggatcgagacaactctgacacacccgttcctcactgtccatggctggcagaggctggaggacctcgctgagggcgatgctatcggggtcccaaggcagctgccagttttcggccaggagcccattagggactgcgaggtgaggctcctgggccacctgatcggggatggcgggctcaccggctcgccacccaggctgacgtctgggcaggaggcgatgacagctgacttcctggaggctgtggatgctttcggcggggtcgaggctaagccaatcagggcgtcccggaggacgcagagctgggtggtcgttggcgctgctcaggcccgcgctgctgctaggtccagcttcgcttcactggtcgacgccctcattaggaggtcccctctcaccggcagggctatcgctaggaacctgggggtggcgccagctaccctcacgtactggaggcagggcgtgaatgtccctgacgctgctatggttgggctcctggctggcgagctgggggttgatgtgggcgagctcaggccagagcctgtggctcgcaggaacgaccgcaatccactgcaggcttggctcgataggctgggcctcgctgggaagtccgctcacgagaagactgtgccagactgcgtcttccggctgcctcgcgagcagctcgctaggttcctgaaccggctcttctcgtctgacgggtgggtgacacatctggctagcggccaggggcagattggctacaccacggtctcggaggctctcgctaggcagatccagcacctcctgctccggttcggcgttctggctaagctcaggcataggtccgtgcgctaccaggacggcaggaggccagcctggcagctggatattactcacgcggagagcatcctcaccttcgctgagcagatcggcattctggggaaggagcagcggctcgcctctgttgctgcttcagtgcgcggcaggaggaggcagtcgcacacggaccatatcccctgcgagatttggcagttcatcgatagggccaggggcgagtggacatgggctgagctggctaggagggctggggtcgcttcatccaatatccacgcctacaggaggggcatgtctaggcagaggctggctgctttcgctgacgctctcggctcaagggagctgaggcagctcgcgagctcggacctgtactgggatcggatcgcctccattcgcccgctcggccataagcaggtgtacgatctcactattccagagactcataacttcattgctaatgatgtttgcgtgcataatacgtccctgggccaagtgacaatcgatggcgggacctacgacatctataggacgacacgcgtcaaccagccttccattgtggggacagccacgttcgatcagtactggagcgtgcgcacctctaagcggacttcaggaacagtgaccgtgaccgatcacttccgcgcctgggcgaaccggggcctgaacctcggcacaatagaccaaattacattgtgcgtggagggttaccaaagctctggatcagccaacatcacccagaacaccttctctcagggctcttcttccggcagttcgggtggctcatccggctccacaacgactactcgcatcgagtgtgagaacatgtccttgtccggaccctacgttagcaggatcaccaatccctttaatggtattgcgctgtacgccaacggagacacagcccgcgctaccgttaacttccccgcaagtcgcaactacaatttccgcctgcggggttgcggcaacaacaataatcttgcccgtgtggacctgaggatcgacggacggaccgtcgggaccttttattaccagggcacatacccctgggaggccccaattgacaatgtttatgtcagtgcggggagtcatacagtcgaaatcactgttactgcggataacggcacatgggacgtgtatgccgactacctggtgatacagtgactcgagggggggcccggtacccaattcgccctatagtgagtcgtattacaattcactggccgtcgttttacaacgtcgtgactgggaaaaccctggcgttacccaacttaatcgccttgcagcacatccccctttcgccagctggcgtaatagcgaagaggcccgcaccgatcgcccttcccaacagttgcgcagcctgaatggcgaatggaaattgtaagcgttaatattttgttaaaattcgcgttaaatttttgttaaatcagctcattttttaaccaataggccgaaatcggcaaaatcccttataaatcaaaagaatagaccgagatagggttgagtgttgttccagtttggaacaagagtccactattaaagaacgtggactccaacgtcaaagggcgaaaaaccgtctatcagggcgatggcccactacgtgaaccatcaccctaatcaagttttttggggtcgaggtgccgtaaagcactaaatcggaaccctaaagggagcccccgatttagagcttgacggggaaagccggcgaacgtggcgagaaaggaagggaagaaagcgaaaggagcgggcgctagggcgctggcaagtgtagcggtcacgctgcgcgtaaccaccacacccgccgcgcttaatgcgccgctacagggcgcgtcaggtg

SEQ ID NO: 3183 - DNA, 5261 bp, Artificial Sequence
  Synthetic Construct, AT-26 intein modified protein encoding nucleic acids in pBluescript
gcacttttcggggaaatgtgcgcggaacccctatttgtttatttttctaaatacattcaaatatgtatccgctcatgagacaataaccctgataaatgcttcaataatattgaaaaaggaagagtatgagtattcaacatttccgtgtcgcccttattcccttttttgcggcattttgccttcctgtttttgctcacccagaaacgctggtgaaagtaaaagatgctgaagatcagttgggtgcacgagtgggttacatcgaactggatctcaacagcggtaagatccttgagagttttcgccccgaagaacgttttccaatgatgagcacttttaaagttctgctatgtggcgcggtattatcccgtattgacgccgggcaagagcaactcggtcgccgcatacactattctcagaatgacttggttgagtactcaccagtcacagaaaagcatcttacggatggcatgacagtaagagaattatgcagtgctgccataaccatgagtgataacactgcggccaacttacttctgacaacgatcggaggaccgaaggagctaaccgcttttttgcacaacatgggggatcatgtaactcgccttgatcgttgggaaccggagctgaatgaagccataccaaacgacgagcgtgacaccacgatgcctgtagcaatggcaacaacgttgcgcaaactattaactggcgaactacttactctagcttcccggcaacaattaatagactggatggaggcggataaagttgcaggaccacttctgcgctcggcccttccggctggctggtttattgctgataaatctggagccggtgagcgtgggtctcgcggtatcattgcagcactggggccagatggtaagccctcccgtatcgtagttatctacacgacggggagtcaggcaactatggatgaacgaaatagacagatcgctgagataggtgcctcactgattaagcattggtaactgtcagaccaagtttactcatatatactttagattgatttaaaacttcatttttaatttaaaaggatctaggtgaagatcctttttgataatctcatgaccaaaatcccttaacgtgagttttcgttccactgagcgtcagaccccgtagaaaagatcaaaggatcttcttgagatcctttttttctgcgcgtaatctgctgcttgcaaacaaaaaaaccaccgctaccagcggtggtttgtttgccggatcaagagctaccaactctttttccgaaggtaactggcttcagcagagcgcagataccaaatactgtccttctagtgtagccgtagttaggccaccacttcaagaactctgtagcaccgcctacatacctcgctctgctaatcctgttaccagtggctgctgccagtggcgataagtcgtgtcttaccgggttggactcaagacgatagttaccggataaggcgcagcggtcgggctgaacggggggttcgtgcacacagcccagcttggagcgaacgacctacaccgaactgagatacctacagcgtgagctatgagaaagcgccacgcttcccgaagggagaaaggcggacaggtatccggtaagcggcagggtcggaacaggagagcgcacgagggagcttccagggggaaacgcctggtatctttatagtcctgtcgggtttcgccacctctgacttgagcgtcgatttttgtgatgctcgtcaggggggcggagcctatggaaaaacgccagcaacgcggcctttttacggttcctggccttttgctggccttttgctcacatgttctttcctgcgttatcccctgattctgtggataaccgtattaccgcctttgagtgagctgataccgctcgccgcagccgaacgaccgagcgcagcgagtcagtgagcgaggaagcggaagagcgcccaatacgcaaaccgcctctccccgcgcgttggccgattcattaatgcagctggcacgacaggtttcccgactggaaagcgggcagtgagcgcaacgcaattaatgtgagttagctcactcattaggcaccccaggctttacactttatgcttccggctcgtatgttgtgtggaattgtgagcggataacaatttcacacaggaaacagcatatgcaaacaagcattactctgacatccaacgcatccggtacgtttgacggttactattacgaactctggaaggatactggcaatacaacaatgacggtctacactcaaggtcgcttttcctgccagtggtcgaacatcaataacgcgttgtttaggaccgggaagaaatacaaccagaattggcagtctcttggcacaatccggatcacgtactctgcgacttacaacccaaacgggaactcctacttgtgtatctatggctggtctaccaacccattggtcgagttctacatcgttgagtcctgggggaactggagaccgcctggtgcctgcgtgcatggggatacaagggttactctcgctgatgggcatgagcggcctattcgggaggtcgtggagtcaaatctggatgatccgaagccagtcgacgatggggtttgggataccgtggacttcgatgtcccttctctgcagtcagacggcacagttgcgactcagaacgctacgaaagtgtggaagcggaaggcgccggagacactctaccgcatcaggaccgctacgggcagggagctggatgtcacaccatcacaccctctcttcgttcagtccgacgggaggttccaggctaggaaggctgaggagctggagtctggcacccatgttgctgtgcccaggaaggtttcaactaacgcctgcaatgagctcgacgtcaccttccggcagtctcaggcccacaaccgcatcgacctcgatctgccaccacagtggacgccagagctcgctaggctgatcgggtacattgttgcggagggctacgtggagcagaggcctgataatacgggctacgtgtccatcacaaacaatgaccgggaggtgctggacgatgccaagagcgtcctggagactctcaacctgaatgtcaccgagcgctccagccacgaggggaagacggcgagggagctcctgtgcagcgctggcgagttcgtgtccttcctcgccagcctggacgagacactcctgcagtcgtctgctgagaggagggtcccgcaggatattatgagggcttccgacaacgtggtcaccgggttcattcggggctacatcgagggggagggccatgtgtcaacgtcccagcgcgagatcacagtcgcgagcatgtcgaagccgctcctggaggacgtcaggaccctcctggttacgcagggcattacagcccagctgcagccccggaacaatgggtcctacaggctcaggatctccggccagagcttccacgactacgcggagcagatcggcttcattactgcccgcaagaccgaggcttgcaggcagttcgaggggacgcatggcaacacaaatctggacattgtgccgaacctgggcccagagctcaggcgcatccgcgaggctctcgggctgactcagagcgagtgcggcctcccaaggtcgacctaccagcactacgagaggggcaggaggaatccctcgcgggattctctggagtcagtgctcgacgctttcgagactaggctggccgagatgaacaatgacactccaatttcggataccgctaggtctgacggcgggggcacgggctcgctcaggcaggatctcaacgggctggctgctctcgtggagggcgacatcgcctgggatcgcatcgagtccattgagcctatcgagcatgacgagaagtgggtctacgatctggagattgagggcacacataactacctcacaaatggggtcgtctctcataatacgtccctgggccaagtgacaatcgatggcgggacctacgacatctataggacgacacgcgtcaaccagccttccattgtggggacagccacgttcgatcagtactggagcgtgcgcacctctaagcggacttcaggaacagtgaccgtgaccgatcacttccgcgcctgggcgaaccggggcctgaacctcggcacaatagaccaaattacattgtgcgtggagggttaccaaagctctggatcagccaacatcacccagaacaccttctctcagggctcttcttccggcagttcgggtggctcatccggctccacaacgactactcgcatcgagtgtgagaacatgtccttgtccggaccctacgttagcaggatcaccaatccctttaatggtattgcgctgtacgccaacggagacacagcccgcgctaccgttaacttccccgcaagtcgcaactacaatttccgcctgcggggttgcggcaacaacaataatcttgcccgtgtggacctgaggatcgacggacggaccgtcgggaccttttattaccagggcacatacccctgggaggccccaattgacaatgtttatgtcagtgcggggagtcatacagtcgaaatcactgttactgcggataacggcacatgggacgtgtatgccgactacctggtgatacagtgactcgagggggggcccggtacccaattcgccctatagtgagtcgtattacaattcactggccgtcgttttacaacgtcgtgactgggaaaaccctggcgttacccaacttaatcgccttgcagcacatccccctttcgccagctggcgtaatagcgaagaggcccgcaccgatcgcccttcccaacagttgcgcagcctgaatggcgaatggaaattgtaagcgttaatattttgttaaaattcgcgttaaatttttgttaaatcagctcattttttaaccaataggccgaaatcggcaaaatcccttataaatcaaaagaatagaccgagatagggttgagtgttgttccagtttggaacaagagtccactattaaagaacgtggactccaacgtcaaagggcgaaaaaccgtctatcagggcgatggcccactacgtgaaccatcaccctaatcaagttttttggggtcgaggtgccgtaaagcactaaatcggaaccctaaagggagcccccgatttagagcttgacggggaaagccggcgaacgtggcgagaaaggaagggaagaaagcgaaaggagcgggcgctagggcgctggcaagtgtagcggtcacgctgcgcgtaaccaccacacccgccgcgcttaatgcgccgctacagggcgcgtcaggtg

SEQ ID NO: 3184 - DNA, 5444 bp, Artificial Sequence
  Synthetic Construct, AT-27 intein modified protein encoding nucleic acids in pBluescript
gcacttttcggggaaatgtgcgcggaacccctatttgtttatttttctaaatacattcaaatatgtatccgctcatgagacaataaccctgataaatgcttcaataatattgaaaaaggaagagtatgagtattcaacatttccgtgtcgcccttattcccttttttgcggcattttgccttcctgtttttgctcacccagaaacgctggtgaaagtaaaagatgctgaagatcagttgggtgcacgagtgggttacatcgaactggatctcaacagcggtaagatccttgagagttttcgccccgaagaacgttttccaatgatgagcacttttaaagttctgctatgtggcgcggtattatcccgtattgacgccgggcaagagcaactcggtcgccgcatacactattctcagaatgacttggttgagtactcaccagtcacagaaaagcatcttacggatggcatgacagtaagagaattatgcagtgctgccataaccatgagtgataacactgcggccaacttacttctgacaacgatcggaggaccgaaggagctaaccgcttttttgcacaacatgggggatcatgtaactcgccttgatcgttgggaaccggagctgaatgaagccataccaaacgacgagcgtgacaccacgatgcctgtagcaatggcaacaacgttgcgcaaactattaactggcgaactacttactctagcttcccggcaacaattaatagactggatggaggcggataaagttgcaggaccacttctgcgctcggcccttccggctggctggtttattgctgataaatctggagccggtgagcgtgggtctcgcggtatcattgcagcactggggccagatggtaagccctcccgtatcgtagttatctacacgacggggagtcaggcaactatggatgaacgaaatagacagatcgctgagataggtgcctcactgattaagcattggtaactgtcagaccaagtttactcatatatactttagattgatttaaaacttcatttttaatttaaaaggatctaggtgaagatcctttttgataatctcatgaccaaaatcccttaacgtgagttttcgttccactgagcgtcagaccccgtagaaaagatcaaaggatcttcttgagatcctttttttctgcgcgtaatctgctgcttgcaaacaaaaaaaccaccgctaccagcggtggtttgtttgccggatcaagagctaccaactctttttccgaaggtaactggcttcagcagagcgcagataccaaatactgtccttctagtgtagccgtagttaggccaccacttcaagaactctgtagcaccgcctacatacctcgctctgctaatcctgttaccagtggctgctgccagtggcgataagtcgtgtcttaccgggttggactcaagacgatagttaccggataaggcgcagcggtcgggctgaacggggggttcgtgcacacagcccagcttggagcgaacgacctacaccgaactgagatacctacagcgtgagctatgagaaagcgccacgcttcccgaagggagaaaggcggacaggtatccggtaagcggcagggtcggaacaggagagcgcacgagggagcttccagggggaaacgcctggtatctttatagtcctgtcgggtttcgccacctctgacttgagcgtcgatttttgtgatgctcgtcaggggggcggagcctatggaaaaacgccagcaacgcggcctttttacggttcctggccttttgctggccttttgctcacatgttctttcctgcgttatcccctgattctgtggataaccgtattaccgcctttgagtgagctgataccgctcgccgcagccgaacgaccgagcgcagcgagtcagtgagcgaggaagcggaagagcgcccaatacgcaaaccgcctctccccgcgcgttggccgattcattaatgcagctggcacgacaggtttcccgactggaaagcgggcagtgagcgcaacgcaattaatgtgagttagctcactcattaggcaccccaggctttacactttatgcttccggctcgtatgttgtgtggaattgtgagcggataacaatttcacacaggaaacagcatatgcaaacaagcattactctgacatccaacgcatccggtacgtttgacggttactattacgaactctggaaggatactggcaatacaacaatgacggtctacactcaaggtcgcttttcctgccagtggtcgaacatcaataacgcgttgtttaggaccgggaagaaatacaaccagaattggcagtctcttggcacaatccggatcacgtactctgcgacttacaacccaaacgggaactcctacttgtgtatctatggctggtctaccaacccattggtcgagttctacatcgttgagtcctgggggaactggagaccgcctggtgcctgcctgactgcggattcggacgttctcgttaggtcggagaatggggatattgagcgccagacggtggactctctcttctcggacgggcaggtggtcctcgcggacggcgataccgacatcgctgtttctaaggagacaccgactgtgctctcactggacgaggcgactgagagggtgagcgagcaggagtcgaccctcgtctctgagaggccactgagggacgatgagagcgtccgcaccatcgagacgtcgaggggcgctgtcaccgttacggacgatcacccaatgtacatcaggcaggacggcgaagtgactgtccggcctgcttccgacattgaggctgggaccgatctcgtggctgctaggaggccaccagacacgatggtcgagccatcagatgagacggttctgtcctgggagacattcgctgccgattgcgacaagcattctaagctctacggcgtcgactgcgggacagagctggctgctcagagggctgcgcgcgatgagtcccagactgctttcgctgagcgctacggctcgtacgggtctgctgtgggcaagtacgagaggggggagaaggacgttccggtgtggctcctgggcgagctcgacatcaggccagatcggattcacgggctgaactacgagacgtcgttcgagaatccattccctctggagtggtccccagagctggctcaggtcatcggctgcctcctgggcgacgggagcattcaccggaacgacgatgagaatgttgtggacgtgcgctaccataacacagatgaggctctcatcgagcgcttcgccagggacatcgagcgcctgttcgatattgagccaacagtcactgacaggcctggcagggagagccaccataagaggaagtaccaggtcgatgttccatcggctgtcggcagggtgctcgtctgcgttctggaggccgtgacggagaacggcacaccagggctcccagacgcggtccggcctgctttcgttggcgccctgttcgacgatgagggccacatctcccgcgaggggaaggcgttcattagcaatacagaccatactctcctgaccggcgtcggggagatgctcgctgagatgggcatcgagaccaagctcgcgccagaccagcacaagctgcatattaggggcaggaggaacctggagcagttcctggaccggatccctattgcgagcgatgagaagttctaccgcggcctcgatgctctggacgcctacgatgtgaccacgaggaaggctgagctcctggaggcgatcaggcaggagccaaagacctcggctgctctcgctcagactctgggcgtgaccagggggtccgtcaataagtacctcagggagctgcgggagtccggccacatcgagaagcagattgaggggtcaaaccggtccctcgacgagaatcgcacggttcagtatgtggcggctgatttcgagggctccgtgtacgctacgctgaggggggagccgtccagcgtgacagtcgaggacgttgagaggcgggagtacgacggccccgtgtacgatctgacggtttcagagaatgctccaaacttcgctgtcaatgggggggctgtggttcataactctacgtccctgggccaagtgacaatcgatggcgggacctacgacatctataggacgacacgcgtcaaccagccttccattgtggggacagccacgttcgatcagtactggagcgtgcgcacctctaagcggacttcaggaacagtgaccgtgaccgatcacttccgcgcctgggcgaaccggggcctgaacctcggcacaatagaccaaattacattgtgcgtggagggttaccaaagctctggatcagccaacatcacccagaacaccttctctcagggctcttcttccggcagttcgggtggctcatccggctccacaacgactactcgcatcgagtgtgagaacatgtccttgtccggaccctacgttagcaggatcaccaatccctttaatggtattgcgctgtacgccaacggagacacagcccgcgctaccgttaacttccccgcaagtcgcaactacaatttccgcctgcggggttgcggcaacaacaataatcttgcccgtgtggacctgaggatcgacggacggaccgtcgggaccttttattaccagggcacatacccctgggaggccccaattgacaatgtttatgtcagtgcggggagtcatacagtcgaaatcactgttactgcggataacggcacatgggacgtgtatgccgactacctggtgatacagtgactcgagggggggcccggtacccaattcgccctatagtgagtcgtattacaattcactggccgtcgttttacaacgtcgtgactgggaaaaccctggcgttacccaacttaatcgccttgcagcacatccccctttcgccagctggcgtaatagcgaagaggcccgcaccgatcgcccttcccaacagttgcgcagcctgaatggcgaatggaaattgtaagcgttaatattttgttaaaattcgcgttaaatttttgttaaatcagctcattttttaaccaataggccgaaatcggcaaaatcccttataaatcaaaagaatagaccgagatagggttgagtgttgttccagtttggaacaagagtccactattaaagaacgtggactccaacgtcaaagggcgaaaaaccgtctatcagggcgatggcccactacgtgaaccatcaccctaatcaagttttttggggtcgaggtgccgtaaagcactaaatcggaaccctaaagggagcccccgatttagagcttgacggggaaagccggcgaacgtggcgagaaaggaagggaagaaagcgaaaggagcgggcgctagggcgctggcaagtgtagcggtcacgctgcgcgtaaccaccacacccgccgcgcttaatgcgccgctacagggcgcgtcaggtg

SEQ ID NO: 3185 - DNA, 4376 bp, Artificial Sequence
  Synthetic Construct, AT-28 intein modified protein encoding nucleic acids in pBluescript
gcacttttcggggaaatgtgcgcggaacccctatttgtttatttttctaaatacattcaaatatgtatccgctcatgagacaataaccctgataaatgcttcaataatattgaaaaaggaagagtatgagtattcaacatttccgtgtcgcccttattcccttttttgcggcattttgccttcctgtttttgctcacccagaaacgctggtgaaagtaaaagatgctgaagatcagttgggtgcacgagtgggttacatcgaactggatctcaacagcggtaagatccttgagagttttcgccccgaagaacgttttccaatgatgagcacttttaaagttctgctatgtggcgcggtattatcccgtattgacgccgggcaagagcaactcggtcgccgcatacactattctcagaatgacttggttgagtactcaccagtcacagaaaagcatcttacggatggcatgacagtaagagaattatgcagtgctgccataaccatgagtgataacactgcggccaacttacttctgacaacgatcggaggaccgaaggagctaaccgcttttttgcacaacatgggggatcatgtaactcgccttgatcgttgggaaccggagctgaatgaagccataccaaacgacgagcgtgacaccacgatgcctgtagcaatggcaacaacgttgcgcaaactattaactggcgaactacttactctagcttcccggcaacaattaatagactggatggaggcggataaagttgcaggaccacttctgcgctcggcccttccggctggctggtttattgctgataaatctggagccggtgagcgtgggtctcgcggtatcattgcagcactggggccagatggtaagccctcccgtatcgtagttatctacacgacggggagtcaggcaactatggatgaacgaaatagacagatcgctgagataggtgcctcactgattaagcattggtaactgtcagaccaagtttactcatatatactttagattgatttaaaacttcatttttaatttaaaaggatctaggtgaagatcctttttgataatctcatgaccaaaatcccttaacgtgagttttcgttccactgagcgtcagaccccgtagaaaagatcaaaggatcttcttgagatcctttttttctgcgcgtaatctgctgcttgcaaacaaaaaaaccaccgctaccagcggtggtttgtttgccggatcaagagctaccaactctttttccgaaggtaactggcttcagcagagcgcagataccaaatactgtccttctagtgtagccgtagttaggccaccacttcaagaactctgtagcaccgcctacatacctcgctctgctaatcctgttaccagtggctgctgccagtggcgataagtcgtgtcttaccgggttggactcaagacgatagttaccggataaggcgcagcggtcgggctgaacggggggttcgtgcacacagcccagcttggagcgaacgacctacaccgaactgagatacctacagcgtgagctatgagaaagcgccacgcttcccgaagggagaaaggcggacaggtatccggtaagcggcagggtcggaacaggagagcgcacgagggagcttccagggggaaacgcctggtatctttatagtcctgtcgggtttcgccacctctgacttgagcgtcgatttttgtgatgctcgtcaggggggcggagcctatggaaaaacgccagcaacgcggcctttttacggttcctggccttttgctggccttttgctcacatgttctttcctgcgttatcccctgattctgtggataaccgtattaccgcctttgagtgagctgataccgctcgccgcagccgaacgaccgagcgcagcgagtcagtgagcgaggaagcggaagagcgcccaatacgcaaaccgcctctccccgcgcgttggccgattcattaatgcagctggcacgacaggtttcccgactggaaagcgggcagtgagcgcaacgcaattaatgtgagttagctcactcattaggcaccccaggctttacactttatgcttccggctcgtatgttgtgtggaattgtgagcggataacaatttcacacaggaaacagcatatgcaaacaagcattactctgacatccaacgcatccggtacgtttgacggttactattacgaactctggaaggatactggcaatacaacaatgacggtctacactcaaggtcgcttttcctgccagtggtcgaacatcaataacgcgttgtttaggaccgggaagaaatacaaccagaattggcagtctcttggcacaatccggatcacgtactctgcgacttacaacccaaacgggaactcctacttgtgtatctatggctggtctaccaacccattggtcgagttctacatcgttgagtcctgggggaactggagaccgcctggtgcctgcgtgcggggggacactacggtcgctctcgctgacgggtcggagcgggagattcgggatctcgtggaggctaatctggatgaccctcggccagttgacgatggggtgtgggacggcgtggatgtcgctgttccttccctcgctgctgacggcaggctggttcagcgcagggcgacaaaagtgtggaagcgggaggctccggagacaatgtaccgggtccgcactgctgctggccacaggctcaccgtcacgccatcgcatcctctgttcgtggctgggtctcacggcccagacgccgtcaggacggaggacctggaggttgggcagctggtgggcgtcgccccggacggcgatgggtcgggccaggtcgctccagacggcggggttatcagggatgctcagccagctccagtgggcgacgctgagaccgtcgcctggtccgcgatcgagagcattacggaggtcgagccggatgaggagtgggtgtacgatctggaggtggagggcactcattcatacctcacggatggggtcgtttcacacaacacgtccctgggccaagtgacaatcgatggcgggacctacgacatctataggacgacacgcgtcaaccagccttccattgtggggacagccacgttcgatcagtactggagcgtgcgcacctctaagcggacttcaggaacagtgaccgtgaccgatcacttccgcgcctgggcgaaccggggcctgaacctcggcacaatagaccaaattacattgtgcgtggagggttaccaaagctctggatcagccaacatcacccagaacaccttctctcagggctcttcttccggcagttcgggtggctcatccggctccacaacgactactcgcatcgagtgtgagaacatgtccttgtccggaccctacgttagcaggatcaccaatccctttaatggtattgcgctgtacgccaacggagacacagcccgcgctaccgttaacttccccgcaagtcgcaactacaatttccgcctgcggggttgcggcaacaacaataatcttgcccgtgtggacctgaggatcgacggacggaccgtcgggaccttttattaccagggcacatacccctgggaggccccaattgacaatgtttatgtcagtgcggggagtcatacagtcgaaatcactgttactgcggataacggcacatgggacgtgtatgccgactacctggtgatacagtgactcgagggggggcccggtacccaattcgccctatagtgagtcgtattacaattcactggccgtcgttttacaacgtcgtgactgggaaaaccctggcgttacccaacttaatcgccttgcagcacatccccctttcgccagctggcgtaatagcgaagaggcccgcaccgatcgcccttcccaacagttgcgcagcctgaatggcgaatggaaattgtaagcgttaatattttgttaaaattcgcgttaaatttttgttaaatcagctcattttttaaccaataggccgaaatcggcaaaatcccttataaatcaaaagaatagaccgagatagggttgagtgttgttccagtttggaacaagagtccactattaaagaacgtggactccaacgtcaaagggcgaaaaaccgtctatcagggcgatggcccactacgtgaaccatcaccctaatcaagttttttggggtcgaggtgccgtaaagcactaaatcggaaccctaaagggagcccccgatttagagcttgacggggaaagccggcgaacgtggcgagaaaggaagggaagaaagcgaaaggagcgggcgctagggcgctggcaagtgtagcggtcacgctgcgcgtaaccaccacacccgccgcgcttaatgcgccgctacagggcgcgtcaggtg

SEQ ID NO: 3186 - DNA, 5141 bp, Artificial Sequence
  Synthetic Construct, AT-29 intein modified protein encoding nucleic acids in pBluescript
gcacttttcggggaaatgtgcgcggaacccctatttgtttatttttctaaatacattcaaatatgtatccgctcatgagacaataaccctgataaatgcttcaataatattgaaaaaggaagagtatgagtattcaacatttccgtgtcgcccttattcccttttttgcggcattttgccttcctgtttttgctcacccagaaacgctggtgaaagtaaaagatgctgaagatcagttgggtgcacgagtgggttacatcgaactggatctcaacagcggtaagatccttgagagttttcgccccgaagaacgttttccaatgatgagcacttttaaagttctgctatgtggcgcggtattatcccgtattgacgccgggcaagagcaactcggtcgccgcatacactattctcagaatgacttggttgagtactcaccagtcacagaaaagcatcttacggatggcatgacagtaagagaattatgcagtgctgccataaccatgagtgataacactgcggccaacttacttctgacaacgatcggaggaccgaaggagctaaccgcttttttgcacaacatgggggatcatgtaactcgccttgatcgttgggaaccggagctgaatgaagccataccaaacgacgagcgtgacaccacgatgcctgtagcaatggcaacaacgttgcgcaaactattaactggcgaactacttactctagcttcccggcaacaattaatagactggatggaggcggataaagttgcaggaccacttctgcgctcggcccttccggctggctggtttattgctgataaatctggagccggtgagcgtgggtctcgcggtatcattgcagcactggggccagatggtaagccctcccgtatcgtagttatctacacgacggggagtcaggcaactatggatgaacgaaatagacagatcgctgagataggtgcctcactgattaagcattggtaactgtcagaccaagtttactcatatatactttagattgatttaaaacttcatttttaatttaaaaggatctaggtgaagatcctttttgataatctcatgaccaaaatcccttaacgtgagttttcgttccactgagcgtcagaccccgtagaaaagatcaaaggatcttcttgagatcctttttttctgcgcgtaatctgctgcttgcaaacaaaaaaaccaccgctaccagcggtggtttgtttgccggatcaagagctaccaactctttttccgaaggtaactggcttcagcagagcgcagataccaaatactgtccttctagtgtagccgtagttaggccaccacttcaagaactctgtagcaccgcctacatacctcgctctgctaatcctgttaccagtggctgctgccagtggcgataagtcgtgtcttaccgggttggactcaagacgatagttaccggataaggcgcagcggtcgggctgaacggggggttcgtgcacacagcccagcttggagcgaacgacctacaccgaactgagatacctacagcgtgagctatgagaaagcgccacgcttcccgaagggagaaaggcggacaggtatccggtaagcggcagggtcggaacaggagagcgcacgagggagcttccagggggaaacgcctggtatctttatagtcctgtcgggtttcgccacctctgacttgagcgtcgatttttgtgatgctcgtcaggggggcggagcctatggaaaaacgccagcaacgcggcctttttacggttcctggccttttgctggccttttgctcacatgttctttcctgcgttatcccctgattctgtggataaccgtattaccgcctttgagtgagctgataccgctcgccgcagccgaacgaccgagcgcagcgagtcagtgagcgaggaagcggaagagcgcccaatacgcaaaccgcctctccccgcgcgttggccgattcattaatgcagctggcacgacaggtttcccgactggaaagcgggcagtgagcgcaacgcaattaatgtgagttagctcactcattaggcaccccaggctttacactttatgcttccggctcgtatgttgtgtggaattgtgagcggataacaatttcacacaggaaacagcatatgcaaacaagcattactctgacatccaacgcatccggtacgtttgacggttactattacgaactctggaaggatactggcaatacaacaatgacggtctacactcaaggtcgcttttcctgccagtggtcgaacatcaataacgcgttgtttaggaccgggaagaaatacaaccagaattggcagtctcttggcacaatccggatcacgtactctgcgacttacaacccaaacgggaactcctacttgtgtatctatggctggtctaccaacccattggtcgagttctacatcgttgagtcctgggggaactggagaccgcctggtgcctcagttacgggggacaggccagtggtcgttagggatccggggggcacagttcgcattctcccaattgaggatctcttcgctagggggaccacggagtcagaggtcctcatcgctgctgacggcgatgtggtcgcttccgctacaccaggcaagactaggagggctctcgacgggtgggatgctctgtccgtgaacgaggacggcgaggctgagtggcagccaatcgcgcaggctattcggcacaacaccgacaagcctgttgtgaatctccagcataagttcggcgagtcaacaactacccgcgaccactcctacgtcgttccaggcgaggatgggctgacgacagtttccccagacgatgtggctgagccttaccgcgtcagcggcgttccagacgtggagcccgtcgagcaggtggatgtctacgaggttctcaggggctacgagagggagtacgaggacggcaggtcggtggggtctgataactcaatcacaaagaggaagcagattcacgcggacgatgagtatgtgtggttcggccatgagcaccatagggacgttgattcgaccgttaaggtgaagcggttcgtggacatcgattctgaggacggcgctgctctgattaggctcctgggggcctacgtcccagagggctccgccagcaccggggagactgcgaccagcaagttcggcgcttcgctcgctgagtctgacagggagtggctcgctcagctgcagagggattacagccggctgttcgagaatactaccgctggcatcattacatcggacaggagggctgagaggactgtggagtaccagacggacacaggcggggcttcggtcacctacaacgatgagacgctcaagctgcagatgatgaatgagctcgcggctgtgttcttcagggagttcgctggccagacgagcagggggaagcggatcccgtcgttcgtcttccacctgcccgaggagaagcaggacctcttcctgaccctcctggtggagggcgatgggagccgcgagttcccaaggtacacggaggcctacgcgcagcggaacttcgacttcgagacgacatctcgcgagctcgctgctggcctgtcaatgctcctgacgcagagggggcagaagcattctctcaagtaccgggactccaaggatagctacactatccgcacctgctccacgtacagggagggcagggacccagtcctgaccgaggctgaccacgatggctacgtgtacgacctctcagtggaggagaatgagaacttcgtggatggggttgggggcatcgtgctgcataatacgtccctgggccaagtgacaatcgatggcgggacctacgacatctataggacgacacgcgtcaaccagccttccattgtggggacagccacgttcgatcagtactggagcgtgcgcacctctaagcggacttcaggaacagtgaccgtgaccgatcacttccgcgcctgggcgaaccggggcctgaacctcggcacaatagaccaaattacattgtgcgtggagggttaccaaagctctggatcagccaacatcacccagaacaccttctctcagggctcttcttccggcagttcgggtggctcatccggctccacaacgactactcgcatcgagtgtgagaacatgtccttgtccggaccctacgttagcaggatcaccaatccctttaatggtattgcgctgtacgccaacggagacacagcccgcgctaccgttaacttccccgcaagtcgcaactacaatttccgcctgcggggttgcggcaacaacaataatcttgcccgtgtggacctgaggatcgacggacggaccgtcgggaccttttattaccagggcacatacccctgggaggccccaattgacaatgtttatgtcagtgcggggagtcatacagtcgaaatcactgttactgcggataacggcacatgggacgtgtatgccgactacctggtgatacagtgactcgagggggggcccggtacccaattcgccctatagtgagtcgtattacaattcactggccgtcgttttacaacgtcgtgactgggaaaaccctggcgttacccaacttaatcgccttgcagcacatccccctttcgccagctggcgtaatagcgaagaggcccgcaccgatcgcccttcccaacagttgcgcagcctgaatggcgaatggaaattgtaagcgttaatattttgttaaaattcgcgttaaatttttgttaaatcagctcattttttaaccaataggccgaaatcggcaaaatcccttataaatcaaaagaatagaccgagatagggttgagtgttgttccagtttggaacaagagtccactattaaagaacgtggactccaacgtcaaagggcgaaaaaccgtctatcagggcgatggcccactacgtgaaccatcaccctaatcaagttttttggggtcgaggtgccgtaaagcactaaatcggaaccctaaagggagcccccgatttagagcttgacggggaaagccggcgaacgtggcgagaaaggaagggaagaaagcgaaaggagcgggcgctagggcgctggcaagtgtagcggtcacgctgcgcgtaaccaccacacccgccgcgcttaatgcgccgctacagggcgcgtcaggtg

SEQ ID NO: 3187 - DNA, 4475 bp, Artificial Sequence
  Synthetic Construct, AT-30 intein modified protein encoding nucleic acids in pBluescript
gcacttttcggggaaatgtgcgcggaacccctatttgtttatttttctaaatacattcaaatatgtatccgctcatgagacaataaccctgataaatgcttcaataatattgaaaaaggaagagtatgagtattcaacatttccgtgtcgcccttattcccttttttgcggcattttgccttcctgtttttgctcacccagaaacgctggtgaaagtaaaagatgctgaagatcagttgggtgcacgagtgggttacatcgaactggatctcaacagcggtaagatccttgagagttttcgccccgaagaacgttttccaatgatgagcacttttaaagttctgctatgtggcgcggtattatcccgtattgacgccgggcaagagcaactcggtcgccgcatacactattctcagaatgacttggttgagtactcaccagtcacagaaaagcatcttacggatggcatgacagtaagagaattatgcagtgctgccataaccatgagtgataacactgcggccaacttacttctgacaacgatcggaggaccgaaggagctaaccgcttttttgcacaacatgggggatcatgtaactcgccttgatcgttgggaaccggagctgaatgaagccataccaaacgacgagcgtgacaccacgatgcctgtagcaatggcaacaacgttgcgcaaactattaactggcgaactacttactctagcttcccggcaacaattaatagactggatggaggcggataaagttgcaggaccacttctgcgctcggcccttccggctggctggtttattgctgataaatctggagccggtgagcgtgggtctcgcggtatcattgcagcactggggccagatggtaagccctcccgtatcgtagttatctacacgacggggagtcaggcaactatggatgaacgaaatagacagatcgctgagataggtgcctcactgattaagcattggtaactgtcagaccaagtttactcatatatactttagattgatttaaaacttcatttttaatttaaaaggatctaggtgaagatcctttttgataatctcatgaccaaaatcccttaacgtgagttttcgttccactgagcgtcagaccccgtagaaaagatcaaaggatcttcttgagatcctttttttctgcgcgtaatctgctgcttgcaaacaaaaaaaccaccgctaccagcggtggtttgtttgccggatcaagagctaccaactctttttccgaaggtaactggcttcagcagagcgcagataccaaatactgtccttctagtgtagccgtagttaggccaccacttcaagaactctgtagcaccgcctacatacctcgctctgctaatcctgttaccagtggctgctgccagtggcgataagtcgtgtcttaccgggttggactcaagacgatagttaccggataaggcgcagcggtcgggctgaacggggggttcgtgcacacagcccagcttggagcgaacgacctacaccgaactgagatacctacagcgtgagctatgagaaagcgccacgcttcccgaagggagaaaggcggacaggtatccggtaagcggcagggtcggaacaggagagcgcacgagggagcttccagggggaaacgcctggtatctttatagtcctgtcgggtttcgccacctctgacttgagcgtcgatttttgtgatgctcgtcaggggggcggagcctatggaaaaacgccagcaacgcggcctttttacggttcctggccttttgctggccttttgctcacatgttctttcctgcgttatcccctgattctgtggataaccgtattaccgcctttgagtgagctgataccgctcgccgcagccgaacgaccgagcgcagcgagtcagtgagcgaggaagcggaagagcgcccaatacgcaaaccgcctctccccgcgcgttggccgattcattaatgcagctggcacgacaggtttcccgactggaaagcgggcagtgagcgcaacgcaattaatgtgagttagctcactcattaggcaccccaggctttacactttatgcttccggctcgtatgttgtgtggaattgtgagcggataacaatttcacacaggaaacagcatatgcaaacaagcattactctgacatccaacgcatccggtacgtttgacggttactattacgaactctggaaggatactggcaatacaacaatgacggtctacactcaaggtcgcttttcctgccagtggtcgaacatcaataacgcgttgtttaggaccgggaagaaatacaaccagaattggcagtctcttggcacaatccggatcacgtactctgcgacttacaacccaaacgggaactcctacttgtgtatctatggctggtctaccaacccattggtcgagttctacatcgttgagtcctgggggaactggagaccgcctggtgcctgcttctcgggggatacggagatcgctctcgcttcgggggattctattactttcgagtcgctggtggacgcttacgagcggggggagacacactactgctacactatcggcgacgatgggcggatccgcattgaggagattatgaacccgcgggtgacccaggaggacgctgctctcctggccgttacgctcgataatggcgaggtcatcaggtgcacacccgaccatgagttcatgctccgggatggcaactactgcgaggcgcagaatctgaccgacgggcagagcctcatgccactgtacaggaccacgacagagatgactgagactaccgagacgacagagactaccgggacagctgagatggtgaagcagccgttcgcccagaacaattgggagtccgtcagccagctcgctaaccgctacaatcgcaggcacacgacaactgaccatatcgttgagacgcagcagattcagtcacagcagcagtcccagatcgagaccgtccagatttctgagagggcggacgttcacaaccataccgtgatctcggtcgagtctctgaccgagacggctgatgtctacgatctggaggttccagttactcataatttcgctctcgcttccggggttttcgttcataatacgtccctgggccaagtgacaatcgatggcgggacctacgacatctataggacgacacgcgtcaaccagccttccattgtggggacagccacgttcgatcagtactggagcgtgcgcacctctaagcggacttcaggaacagtgaccgtgaccgatcacttccgcgcctgggcgaaccggggcctgaacctcggcacaatagaccaaattacattgtgcgtggagggttaccaaagctctggatcagccaacatcacccagaacaccttctctcagggctcttcttccggcagttcgggtggctcatccggctccacaacgactactcgcatcgagtgtgagaacatgtccttgtccggaccctacgttagcaggatcaccaatccctttaatggtattgcgctgtacgccaacggagacacagcccgcgctaccgttaacttccccgcaagtcgcaactacaatttccgcctgcggggttgcggcaacaacaataatcttgcccgtgtggacctgaggatcgacggacggaccgtcgggaccttttattaccagggcacatacccctgggaggccccaattgacaatgtttatgtcagtgcggggagtcatacagtcgaaatcactgttactgcggataacggcacatgggacgtgtatgccgactacctggtgatacagtgactcgagggggggcccggtacccaattcgccctatagtgagtcgtattacaattcactggccgtcgttttacaacgtcgtgactgggaaaaccctggcgttacccaacttaatcgccttgcagcacatccccctttcgccagctggcgtaatagcgaagaggcccgcaccgatcgcccttcccaacagttgcgcagcctgaatggcgaatggaaattgtaagcgttaatattttgttaaaattcgcgttaaatttttgttaaatcagctcattttttaaccaataggccgaaatcggcaaaatcccttataaatcaaaagaatagaccgagatagggttgagtgttgttccagtttggaacaagagtccactattaaagaacgtggactccaacgtcaaagggcgaaaaaccgtctatcagggcgatggcccactacgtgaaccatcaccctaatcaagttttttggggtcgaggtgccgtaaagcactaaatcggaaccctaaagggagcccccgatttagagcttgacggggaaagccggcgaacgtggcgagaaaggaagggaagaaagcgaaaggagcgggcgctagggcgctggcaagtgtagcggtcacgctgcgcgtaaccaccacacccgccgcgcttaatgcgccgctacagggcgcgtcaggtg

SEQ ID NO: 3188 - DNA, 4457 bp, Artificial Sequence
  Synthetic Construct, AT-31 intein modified protein encoding nucleic acids in pBluescript
gcacttttcggggaaatgtgcgcggaacccctatttgtttatttttctaaatacattcaaatatgtatccgctcatgagacaataaccctgataaatgcttcaataatattgaaaaaggaagagtatgagtattcaacatttccgtgtcgcccttattcccttttttgcggcattttgccttcctgtttttgctcacccagaaacgctggtgaaagtaaaagatgctgaagatcagttgggtgcacgagtgggttacatcgaactggatctcaacagcggtaagatccttgagagttttcgccccgaagaacgttttccaatgatgagcacttttaaagttctgctatgtggcgcggtattatcccgtattgacgccgggcaagagcaactcggtcgccgcatacactattctcagaatgacttggttgagtactcaccagtcacagaaaagcatcttacggatggcatgacagtaagagaattatgcagtgctgccataaccatgagtgataacactgcggccaacttacttctgacaacgatcggaggaccgaaggagctaaccgcttttttgcacaacatgggggatcatgtaactcgccttgatcgttgggaaccggagctgaatgaagccataccaaacgacgagcgtgacaccacgatgcctgtagcaatggcaacaacgttgcgcaaactattaactggcgaactacttactctagcttcccggcaacaattaatagactggatggaggcggataaagttgcaggaccacttctgcgctcggcccttccggctggctggtttattgctgataaatctggagccggtgagcgtgggtctcgcggtatcattgcagcactggggccagatggtaagccctcccgtatcgtagttatctacacgacggggagtcaggcaactatggatgaacgaaatagacagatcgctgagataggtgcctcactgattaagcattggtaactgtcagaccaagtttactcatatatactttagattgatttaaaacttcatttttaatttaaaaggatctaggtgaagatcctttttgataatctcatgaccaaaatcccttaacgtgagttttcgttccactgagcgtcagaccccgtagaaaagatcaaaggatcttcttgagatcctttttttctgcgcgtaatctgctgcttgcaaacaaaaaaaccaccgctaccagcggtggtttgtttgccggatcaagagctaccaactctttttccgaaggtaactggcttcagcagagcgcagataccaaatactgtccttctagtgtagccgtagttaggccaccacttcaagaactctgtagcaccgcctacatacctcgctctgctaatcctgttaccagtggctgctgccagtggcgataagtcgtgtcttaccgggttggactcaagacgatagttaccggataaggcgcagcggtcgggctgaacggggggttcgtgcacacagcccagcttggagcgaacgacctacaccgaactgagatacctacagcgtgagctatgagaaagcgccacgcttcccgaagggagaaaggcggacaggtatccggtaagcggcagggtcggaacaggagagcgcacgagggagcttccagggggaaacgcctggtatctttatagtcctgtcgggtttcgccacctctgacttgagcgtcgatttttgtgatgctcgtcaggggggcggagcctatggaaaaacgccagcaacgcggcctttttacggttcctggccttttgctggccttttgctcacatgttctttcctgcgttatcccctgattctgtggataaccgtattaccgcctttgagtgagctgataccgctcgccgcagccgaacgaccgagcgcagcgagtcagtgagcgaggaagcggaagagcgcccaatacgcaaaccgcctctccccgcgcgttggccgattcattaatgcagctggcacgacaggtttcccgactggaaagcgggcagtgagcgcaacgcaattaatgtgagttagctcactcattaggcaccccaggctttacactttatgcttccggctcgtatgttgtgtggaattgtgagcggataacaatttcacacaggaaacagcatatgcaaacaagcattactctgacatccaacgcatccggtacgtttgacggttactattacgaactctggaaggatactggcaatacaacaatgacggtctacactcaaggtcgcttttcctgccagtggtcgaacatcaataacgcgttgtttaggaccgggaagaaatacaaccagaattggcagtctcttggcacaatccggatcacgtactctgcgacttacaacccaaacgggaactcctacttgtgtatctatggctggtctaccaacccattggtcgagttctacatcgttgagtcctgggggaactggagaccgcctggtgcctgcgtttcgggggagacagacatcgctctcgtggagggcaagaccgctactatcggggagctcgtggagtcggcgctgacagacccaaagccggttgacgatggcgtgtgggacaccgcggatttcaccgtgacgtcggctatcgagacgggcgagctcattgagcgggacgtcacacgcgtttggaagaggcagtcccccgagacgatgcggcagatccagattgctggcgggaggagcgtgacagtcactccatcgcaccccgttttcgtggagcataatgggtcttacaccgctaggagggctgactccctgagcgctggcgagtcagtggctatcgctgacgatgtcgccgactcacacccgatttccgtcgataacactgcgaataccctcaacccaaggtcgatgtctacgcctggcatcaccacggacggcgggctgtacaggacagggtccgatggcgggattgtccatgccgaggttggcaaggaggacgttactgattgcctcacaactgacaggatcaccgctgtgaagaccgtcacgccaacagctgagtgggtctacgatctggaggtggagggcacacacgcctacctcacaaacggggttctctcacacaacacgtccctgggccaagtgacaatcgatggcgggacctacgacatctataggacgacacgcgtcaaccagccttccattgtggggacagccacgttcgatcagtactggagcgtgcgcacctctaagcggacttcaggaacagtgaccgtgaccgatcacttccgcgcctgggcgaaccggggcctgaacctcggcacaatagaccaaattacattgtgcgtggagggttaccaaagctctggatcagccaacatcacccagaacaccttctctcagggctcttcttccggcagttcgggtggctcatccggctccacaacgactactcgcatcgagtgtgagaacatgtccttgtccggaccctacgttagcaggatcaccaatccctttaatggtattgcgctgtacgccaacggagacacagcccgcgctaccgttaacttccccgcaagtcgcaactacaatttccgcctgcggggttgcggcaacaacaataatcttgcccgtgtggacctgaggatcgacggacggaccgtcgggaccttttattaccagggcacatacccctgggaggccccaattgacaatgtttatgtcagtgcggggagtcatacagtcgaaatcactgttactgcggataacggcacatgggacgtgtatgccgactacctggtgatacagtgactcgagggggggcccggtacccaattcgccctatagtgagtcgtattacaattcactggccgtcgttttacaacgtcgtgactgggaaaaccctggcgttacccaacttaatcgccttgcagcacatccccctttcgccagctggcgtaatagcgaagaggcccgcaccgatcgcccttcccaacagttgcgcagcctgaatggcgaatggaaattgtaagcgttaatattttgttaaaattcgcgttaaatttttgttaaatcagctcattttttaaccaataggccgaaatcggcaaaatcccttataaatcaaaagaatagaccgagatagggttgagtgttgttccagtttggaacaagagtccactattaaagaacgtggactccaacgtcaaagggcgaaaaaccgtctatcagggcgatggcccactacgtgaaccatcaccctaatcaagttttttggggtcgaggtgccgtaaagcactaaatcggaaccctaaagggagcccccgatttagagcttgacggggaaagccggcgaacgtggcgagaaaggaagggaagaaagcgaaaggagcgggcgctagggcgctggcaagtgtagcggtcacgctgcgcgtaaccaccacacccgccgcgcttaatgcgccgctacagggcgcgtcaggtg

SEQ ID NO: 3189 - DNA, 5546 bp, Artificial Sequence
  Synthetic Construct, AT-32 intein modified protein encoding nucleic acids in pBluescript
gcacttttcggggaaatgtgcgcggaacccctatttgtttatttttctaaatacattcaaatatgtatccgctcatgagacaataaccctgataaatgcttcaataatattgaaaaaggaagagtatgagtattcaacatttccgtgtcgcccttattcccttttttgcggcattttgccttcctgtttttgctcacccagaaacgctggtgaaagtaaaagatgctgaagatcagttgggtgcacgagtgggttacatcgaactggatctcaacagcggtaagatccttgagagttttcgccccgaagaacgttttccaatgatgagcacttttaaagttctgctatgtggcgcggtattatcccgtattgacgccgggcaagagcaactcggtcgccgcatacactattctcagaatgacttggttgagtactcaccagtcacagaaaagcatcttacggatggcatgacagtaagagaattatgcagtgctgccataaccatgagtgataacactgcggccaacttacttctgacaacgatcggaggaccgaaggagctaaccgcttttttgcacaacatgggggatcatgtaactcgccttgatcgttgggaaccggagctgaatgaagccataccaaacgacgagcgtgacaccacgatgcctgtagcaatggcaacaacgttgcgcaaactattaactggcgaactacttactctagcttcccggcaacaattaatagactggatggaggcggataaagttgcaggaccacttctgcgctcggcccttccggctggctggtttattgctgataaatctggagccggtgagcgtgggtctcgcggtatcattgcagcactggggccagatggtaagccctcccgtatcgtagttatctacacgacggggagtcaggcaactatggatgaacgaaatagacagatcgctgagataggtgcctcactgattaagcattggtaactgtcagaccaagtttactcatatatactttagattgatttaaaacttcatttttaatttaaaaggatctaggtgaagatcctttttgataatctcatgaccaaaatcccttaacgtgagttttcgttccactgagcgtcagaccccgtagaaaagatcaaaggatcttcttgagatcctttttttctgcgcgtaatctgctgcttgcaaacaaaaaaaccaccgctaccagcggtggtttgtttgccggatcaagagctaccaactctttttccgaaggtaactggcttcagcagagcgcagataccaaatactgtccttctagtgtagccgtagttaggccaccacttcaagaactctgtagcaccgcctacatacctcgctctgctaatcctgttaccagtggctgctgccagtggcgataagtcgtgtcttaccgggttggactcaagacgatagttaccggataaggcgcagcggtcgggctgaacggggggttcgtgcacacagcccagcttggagcgaacgacctacaccgaactgagatacctacagcgtgagctatgagaaagcgccacgcttcccgaagggagaaaggcggacaggtatccggtaagcggcagggtcggaacaggagagcgcacgagggagcttccagggggaaacgcctggtatctttatagtcctgtcgggtttcgccacctctgacttgagcgtcgatttttgtgatgctcgtcaggggggcggagcctatggaaaaacgccagcaacgcggcctttttacggttcctggccttttgctggccttttgctcacatgttctttcctgcgttatcccctgattctgtggataaccgtattaccgcctttgagtgagctgataccgctcgccgcagccgaacgaccgagcgcagcgagtcagtgagcgaggaagcggaagagcgcccaatacgcaaaccgcctctccccgcgcgttggccgattcattaatgcagctggcacgacaggtttcccgactggaaagcgggcagtgagcgcaacgcaattaatgtgagttagctcactcattaggcaccccaggctttacactttatgcttccggctcgtatgttgtgtggaattgtgagcggataacaatttcacacaggaaacagcatatgcaaacaagcattactctgacatccaacgcatccggtacgtttgacggttactattacgaactctggaaggatactggcaatacaacaatgacggtctacactcaaggtcgcttttcctgccagtggtcgaacatcaataacgcgttgtttaggaccgggaagaaatacaaccagaattggcagtctcttggcacaatccggatcacgtactctgcgacttacaacccaaacgggaactcctacttgtgtatctatggctggtctaccaacccattggtcgagttctacatcgttgagtcctgggggaactggagaccgcctggtgcctcataccatcctaggtcggaggtcctgctcgctgacgggcagcggattgacatcggcactttcgtggattcgcgcattgagaagaataacgccaatgttatcgacggcattaactgcgagatcctgccggtggacgatattgatgtttacaccgtggacacagatactgggtccgctagcacggtttccattgacagggtgagccggcacccagctccatccgagttcatccgcgtgaagttcagcaacggcaggtcggttctcgtgaccccggagcatcccatgttcatcgacgatgggtcagagaccaagacggtccaggctaatgctctgagcggcggggagttcgttccagctcctcaccatctcccaggcgtgaacaccgacgcgtccagcgtctccgacgatatcaatgatgttagcaccattaggacgcacgtgaggtcccgggcgcgcgctaaggctgaggtcgaggttcgcgctacggacggcgagttcaagctcatcgatgccgcgcagaccctgggcatcattacggctgtggggaaggtgagcgtcgacgctccagagcggggcatcattgtcgacatggatcgcacagttgactcgtctaaggattcgatcaacaatgtcctggggtctgttattccttcaaacgacaatgattctatcactagggtccaggacacaggctcgactgggaaccagtggaggtggtctgtgaataccttcatcgagcggatgatcgagattgctccagctgtcacggctgacaggccaaacaggagggtgcctgatgctgtcctcggcgggagcgaggctgtggtccagcagttcctgacaggcgtgatcattgctgccgggcggatcctcgacgagactatccgcatctacgcttcatccaacgagctcgcctgcgactacgccgatgcgttcctcaggctgggcatcaccgcttccgtcgaggacgggccagctgagatcgcggctcagaccgtgatcaagtgcgacagcgattacgagcgcgcgtgcggcatgttcgacatcagctcgtctaggaccacgccctccgatacatcatcccagaacaatcagagctcggtcaccgcccagaacgaggacacgcaccagacaactagccatgagatcctcccgtcgggcattgcggatgagctgcagagcatcaggcagctcctgaacattcccgcctcggagcagctggcgtctatcacggctggcgacgatgggatcgcgctctcgattgctagggccgagatcaacctcctgcgggaccacattgagacactgcgcatggatactgagaatgtcagcattggccgcgacgattgcgttacaccgactatctcttcatccagcaagtacaagtacgcgaagaactcaatcacctccgacgagaatctccagctgttcggccagtcacaggcccagctgtccgagaggacaaagaccacggagtcgtcttcaatctcggcgtctactgacctcgtgtctatcccagctaacatttcagagaataggctcgtggctgctacacagaggctggacgaggtcgagactcgctgcaaccggcgctaccacagggtcatcgccgttgacacggtgtccaatgccggccctcatgcgtgcgagtgggtctacgatattactgtggagcctaccaacactttcatttcttccggggtcgttctgcataacacgtccctgggccaagtgacaatcgatggcgggacctacgacatctataggacgacacgcgtcaaccagccttccattgtggggacagccacgttcgatcagtactggagcgtgcgcacctctaagcggacttcaggaacagtgaccgtgaccgatcacttccgcgcctgggcgaaccggggcctgaacctcggcacaatagaccaaattacattgtgcgtggagggttaccaaagctctggatcagccaacatcacccagaacaccttctctcagggctcttcttccggcagttcgggtggctcatccggctccacaacgactactcgcatcgagtgtgagaacatgtccttgtccggaccctacgttagcaggatcaccaatccctttaatggtattgcgctgtacgccaacggagacacagcccgcgctaccgttaacttccccgcaagtcgcaactacaatttccgcctgcggggttgcggcaacaacaataatcttgcccgtgtggacctgaggatcgacggacggaccgtcgggaccttttattaccagggcacatacccctgggaggccccaattgacaatgtttatgtcagtgcggggagtcatacagtcgaaatcactgttactgcggataacggcacatgggacgtgtatgccgactacctggtgatacagtgactcgagggggggcccggtacccaattcgccctatagtgagtcgtattacaattcactggccgtcgttttacaacgtcgtgactgggaaaaccctggcgttacccaacttaatcgccttgcagcacatccccctttcgccagctggcgtaatagcgaagaggcccgcaccgatcgcccttcccaacagttgcgcagcctgaatggcgaatggaaattgtaagcgttaatattttgttaaaattcgcgttaaatttttgttaaatcagctcattttttaaccaataggccgaaatcggcaaaatcccttataaatcaaaagaatagaccgagatagggttgagtgttgttccagtttggaacaagagtccactattaaagaacgtggactccaacgtcaaagggcgaaaaaccgtctatcagggcgatggcccactacgtgaaccatcaccctaatcaagttttttggggtcgaggtgccgtaaagcactaaatcggaaccctaaagggagcccccgatttagagcttgacggggaaagccggcgaacgtggcgagaaaggaagggaagaaagcgaaaggagcgggcgctagggcgctggcaagtgtagcggtcacgctgcgcgtaaccaccacacccgccgcgcttaatgcgccgctacagggcgcgtcaggtg

SEQ ID NO: 3190 - DNA, 4904 bp, Artificial Sequence
  Synthetic Construct, AT-33 intein modified protein encoding nucleic acids in pBluescript
gcacttttcggggaaatgtgcgcggaacccctatttgtttatttttctaaatacattcaaatatgtatccgctcatgagacaataaccctgataaatgcttcaataatattgaaaaaggaagagtatgagtattcaacatttccgtgtcgcccttattcccttttttgcggcattttgccttcctgtttttgctcacccagaaacgctggtgaaagtaaaagatgctgaagatcagttgggtgcacgagtgggttacatcgaactggatctcaacagcggtaagatccttgagagttttcgccccgaagaacgttttccaatgatgagcacttttaaagttctgctatgtggcgcggtattatcccgtattgacgccgggcaagagcaactcggtcgccgcatacactattctcagaatgacttggttgagtactcaccagtcacagaaaagcatcttacggatggcatgacagtaagagaattatgcagtgctgccataaccatgagtgataacactgcggccaacttacttctgacaacgatcggaggaccgaaggagctaaccgcttttttgcacaacatgggggatcatgtaactcgccttgatcgttgggaaccggagctgaatgaagccataccaaacgacgagcgtgacaccacgatgcctgtagcaatggcaacaacgttgcgcaaactattaactggcgaactacttactctagcttcccggcaacaattaatagactggatggaggcggataaagttgcaggaccacttctgcgctcggcccttccggctggctggtttattgctgataaatctggagccggtgagcgtgggtctcgcggtatcattgcagcactggggccagatggtaagccctcccgtatcgtagttatctacacgacggggagtcaggcaactatggatgaacgaaatagacagatcgctgagataggtgcctcactgattaagcattggtaactgtcagaccaagtttactcatatatactttagattgatttaaaacttcatttttaatttaaaaggatctaggtgaagatcctttttgataatctcatgaccaaaatcccttaacgtgagttttcgttccactgagcgtcagaccccgtagaaaagatcaaaggatcttcttgagatcctttttttctgcgcgtaatctgctgcttgcaaacaaaaaaaccaccgctaccagcggtggtttgtttgccggatcaagagctaccaactctttttccgaaggtaactggcttcagcagagcgcagataccaaatactgtccttctagtgtagccgtagttaggccaccacttcaagaactctgtagcaccgcctacatacctcgctctgctaatcctgttaccagtggctgctgccagtggcgataagtcgtgtcttaccgggttggactcaagacgatagttaccggataaggcgcagcggtcgggctgaacggggggttcgtgcacacagcccagcttggagcgaacgacctacaccgaactgagatacctacagcgtgagctatgagaaagcgccacgcttcccgaagggagaaaggcggacaggtatccggtaagcggcagggtcggaacaggagagcgcacgagggagcttccagggggaaacgcctggtatctttatagtcctgtcgggtttcgccacctctgacttgagcgtcgatttttgtgatgctcgtcaggggggcggagcctatggaaaaacgccagcaacgcggcctttttacggttcctggccttttgctggccttttgctcacatgttctttcctgcgttatcccctgattctgtggataaccgtattaccgcctttgagtgagctgataccgctcgccgcagccgaacgaccgagcgcagcgagtcagtgagcgaggaagcggaagagcgcccaatacgcaaaccgcctctccccgcgcgttggccgattcattaatgcagctggcacgacaggtttcccgactggaaagcgggcagtgagcgcaacgcaattaatgtgagttagctcactcattaggcaccccaggctttacactttatgcttccggctcgtatgttgtgtggaattgtgagcggataacaatttcacacaggaaacagcatatgcaaacaagcattactctgacatccaacgcatccggtacgtttgacggttactattacgaactctggaaggatactggcaatacaacaatgacggtctacactcaaggtcgcttttcctgccagtggtcgaacatcaataacgcgttgtttaggaccgggaagaaatacaaccagaattggcagtctcttggcacaatccggatcacgtactctgcgacttacaacccaaacgggaactcctacttgtgtatctatggctggtctaccaacccattggtcgagttctacatcgttgagtcctgggggaactggagaccgcctggtgcctgcttcactcctgatacaaatgttctgacgcctaatggggttcgcaatattcgggatctcacggtcggggattcggtttactcgctgaacccggagaccatgcagatggagatcaagccggtgacacagactcacgagtaccccgactaccagggcgacctcatcgatattcagacaaacgagatcgatttccgcgtcactccaaatcataggatgctggttgaggctaccggcacggacaccacgtccaccaacgactacgatttcatcgaggccgggaatctcgatatttccagccggtacgagctgcctcacggctggtccgttgaccatacggatagcctcggggcctacatcgacctgattaccctcctgagggagcagtcagacacgtacaacgtcctctccgatggcgggatgacaactgctgctacggctgacatcaatcacaacaatgtcacccgcagggttgactctgatacgttcgtgtcactgattggctggtatgtggctacagggcgggtctcgcgcactcagaacggctctgacagggtctacctccagctgtcccagacaaatactaaggcgcggacccagctcacgatgctcctggacgagctgggcgtggactggcaggctgataacgagaagatccacttcgtgtctcatgtctggacggagctcttcgacaccacgtgcggccgcacagagaagaacaagcacatcccggagctgattttcgacgcttcagcctcccagaagagggcgttcttcgatgctatcattaacggcagcggggtcaagaatgacgattcgtaccagtaccacacctcgtctgaggacctcagggacgatatcctccggctgtgcgttcatatcggcattgtggcgcggtacgactacatcaacgatgagtcctggcgcattgagtgcaccgagacggccaatcccgacttcacactgactcatagcggcaggcagtcgacagctgaggatggggtttactgcgtgactgtggcggataatcagactctgctcgccgggaggaatggcaccttccagtggacaggcaacacgtccctgggccaagtgacaatcgatggcgggacctacgacatctataggacgacacgcgtcaaccagccttccattgtggggacagccacgttcgatcagtactggagcgtgcgcacctctaagcggacttcaggaacagtgaccgtgaccgatcacttccgcgcctgggcgaaccggggcctgaacctcggcacaatagaccaaattacattgtgcgtggagggttaccaaagctctggatcagccaacatcacccagaacaccttctctcagggctcttcttccggcagttcgggtggctcatccggctccacaacgactactcgcatcgagtgtgagaacatgtccttgtccggaccctacgttagcaggatcaccaatccctttaatggtattgcgctgtacgccaacggagacacagcccgcgctaccgttaacttccccgcaagtcgcaactacaatttccgcctgcggggttgcggcaacaacaataatcttgcccgtgtggacctgaggatcgacggacggaccgtcgggaccttttattaccagggcacatacccctgggaggccccaattgacaatgtttatgtcagtgcggggagtcatacagtcgaaatcactgttactgcggataacggcacatgggacgtgtatgccgactacctggtgatacagtgactcgagggggggcccggtacccaattcgccctatagtgagtcgtattacaattcactggccgtcgttttacaacgtcgtgactgggaaaaccctggcgttacccaacttaatcgccttgcagcacatccccctttcgccagctggcgtaatagcgaagaggcccgcaccgatcgcccttcccaacagttgcgcagcctgaatggcgaatggaaattgtaagcgttaatattttgttaaaattcgcgttaaatttttgttaaatcagctcattttttaaccaataggccgaaatcggcaaaatcccttataaatcaaaagaatagaccgagatagggttgagtgttgttccagtttggaacaagagtccactattaaagaacgtggactccaacgtcaaagggcgaaaaaccgtctatcagggcgatggcccactacgtgaaccatcaccctaatcaagttttttggggtcgaggtgccgtaaagcactaaatcggaaccctaaagggagcccccgatttagagcttgacggggaaagccggcgaacgtggcgagaaaggaagggaagaaagcgaaaggagcgggcgctagggcgctggcaagtgtagcggtcacgctgcgcgtaaccaccacacccgccgcgcttaatgcgccgctacagggcgcgtcaggtg

SEQ ID NO: 3191 - DNA, 5417 bp, Artificial Sequence
  Synthetic Construct, AT-34 intein modified protein encoding nucleic acids in pBluescript
gcacttttcggggaaatgtgcgcggaacccctatttgtttatttttctaaatacattcaaatatgtatccgctcatgagacaataaccctgataaatgcttcaataatattgaaaaaggaagagtatgagtattcaacatttccgtgtcgcccttattcccttttttgcggcattttgccttcctgtttttgctcacccagaaacgctggtgaaagtaaaagatgctgaagatcagttgggtgcacgagtgggttacatcgaactggatctcaacagcggtaagatccttgagagttttcgccccgaagaacgttttccaatgatgagcacttttaaagttctgctatgtggcgcggtattatcccgtattgacgccgggcaagagcaactcggtcgccgcatacactattctcagaatgacttggttgagtactcaccagtcacagaaaagcatcttacggatggcatgacagtaagagaattatgcagtgctgccataaccatgagtgataacactgcggccaacttacttctgacaacgatcggaggaccgaaggagctaaccgcttttttgcacaacatgggggatcatgtaactcgccttgatcgttgggaaccggagctgaatgaagccataccaaacgacgagcgtgacaccacgatgcctgtagcaatggcaacaacgttgcgcaaactattaactggcgaactacttactctagcttcccggcaacaattaatagactggatggaggcggataaagttgcaggaccacttctgcgctcggcccttccggctggctggtttattgctgataaatctggagccggtgagcgtgggtctcgcggtatcattgcagcactggggccagatggtaagccctcccgtatcgtagttatctacacgacggggagtcaggcaactatggatgaacgaaatagacagatcgctgagataggtgcctcactgattaagcattggtaactgtcagaccaagtttactcatatatactttagattgatttaaaacttcatttttaatttaaaaggatctaggtgaagatcctttttgataatctcatgaccaaaatcccttaacgtgagttttcgttccactgagcgtcagaccccgtagaaaagatcaaaggatcttcttgagatcctttttttctgcgcgtaatctgctgcttgcaaacaaaaaaaccaccgctaccagcggtggtttgtttgccggatcaagagctaccaactctttttccgaaggtaactggcttcagcagagcgcagataccaaatactgtccttctagtgtagccgtagttaggccaccacttcaagaactctgtagcaccgcctacatacctcgctctgctaatcctgttaccagtggctgctgccagtggcgataagtcgtgtcttaccgggttggactcaagacgatagttaccggataaggcgcagcggtcgggctgaacggggggttcgtgcacacagcccagcttggagcgaacgacctacaccgaactgagatacctacagcgtgagctatgagaaagcgccacgcttcccgaagggagaaaggcggacaggtatccggtaagcggcagggtcggaacaggagagcgcacgagggagcttccagggggaaacgcctggtatctttatagtcctgtcgggtttcgccacctctgacttgagcgtcgatttttgtgatgctcgtcaggggggcggagcctatggaaaaacgccagcaacgcggcctttttacggttcctggccttttgctggccttttgctcacatgttctttcctgcgttatcccctgattctgtggataaccgtattaccgcctttgagtgagctgataccgctcgccgcagccgaacgaccgagcgcagcgagtcagtgagcgaggaagcggaagagcgcccaatacgcaaaccgcctctccccgcgcgttggccgattcattaatgcagctggcacgacaggtttcccgactggaaagcgggcagtgagcgcaacgcaattaatgtgagttagctcactcattaggcaccccaggctttacactttatgcttccggctcgtatgttgtgtggaattgtgagcggataacaatttcacacaggaaacagcatatgcaaacaagcattactctgacatccaacgcatccggtacgtttgacggttactattacgaactctggaaggatactggcaatacaacaatgacggtctacactcaaggtcgcttttcctgccagtggtcgaacatcaataacgcgttgtttaggaccgggaagaaatacaaccagaattggcagtctcttggcacaatccggatcacgtactctgcgacttacaacccaaacgggaactcctacttgtgtatctatggctggtctaccaacccattggtcgagttctacatcgttgagtcctgggggaactggagaccgcctggtgcctgcttccatcctgagactaagatttggttcagggacacagacaatgagtggcatcatgagactattcagactttcgtggaggaccgcctggacgatccagagatcgatgcggttggcacgctcgtgcaggaggtcgacgataacacagaccgggagatctctgtgccttcaattgacgataatggcaacgagcgcctgcagtcagttactgctgtgtccaagcacagggccccaaatcatctcgtgcagatcgagaccattagcggcagggagatcacaattactcctgaccacgagatgcatatcttcgagcagggcaacctggtgtcgaagcaggcttctaagatcacgtcaggggagtacgccgtcatcccgaagcgcctccagacgatttccccatccagccacacacctcagcatgatctcctgagggagttcctcacgcgggatgagctgacagccgacaggctcatcattcacacgtctgacccagtccggctctgcaaccgcgttttccctgaggaggtgacatcatgcaaggatgcggttgagatcatgcagaatactgcttgccatctggacaagaacaaggagaccctcatcggctggctgggcgaggggcgcattccggtcgctctcctgagggggttcgttgagacggacgaggcgctcctgatgagcatccccgacgatgttcagattggcctgaggggggagaaggtgcgcatcgacaggcacattggcttcacggaggagctcacatcgctcctgggctactacgctgctgctgggatcgtgcatacccagacgaatcccatttcctacgagagcgcgcagcaggagcagtcgaggatcaccttctacaacattgatacacagactcagaccgacctcctgaatgccctgaactctgtcttcgagatcgagccgattcagtacaacctggacggcgagatcctcggcgtgccaggggagctcattaggagggtcttcgatactgtcttcgacgttgggacccagccatcccacaagcggatcccccaggctctgttcgatgcctcagagtcccacatcacgagctacctgcgctgcttcttctccactcatgacagcctcaccacggataccagggacatcagcgctacaactgtgtcgcgggagttcaaggaggacatcattgctgctctcaggaggctgggcatcacagctgaggtcaccacgcagcagagcaggtcggtgccagaggtcctcccagactggtacgcgatcgacgatattacgcaccatgacgctgataattccctcaacctgacacggtcctacgtgatctctattgcgtcgtctgatgctgttaccctgcagagggacaggcaggctcaggagcagatcaagtacgacgcgcagggcctcatcgccaacaataacgcgattcaccagagcaggcaagtgactgatggcgggaggaaggactacatcactgagccgatcaccgacattgagtatgtggacgcggatatcgactacacctactgcctcactgtttcggagactcactcactcatcgttaatgatctctctcagaagcagacgtccctgggccaagtgacaatcgatggcgggacctacgacatctataggacgacacgcgtcaaccagccttccattgtggggacagccacgttcgatcagtactggagcgtgcgcacctctaagcggacttcaggaacagtgaccgtgaccgatcacttccgcgcctgggcgaaccggggcctgaacctcggcacaatagaccaaattacattgtgcgtggagggttaccaaagctctggatcagccaacatcacccagaacaccttctctcagggctcttcttccggcagttcgggtggctcatccggctccacaacgactactcgcatcgagtgtgagaacatgtccttgtccggaccctacgttagcaggatcaccaatccctttaatggtattgcgctgtacgccaacggagacacagcccgcgctaccgttaacttccccgcaagtcgcaactacaatttccgcctgcggggttgcggcaacaacaataatcttgcccgtgtggacctgaggatcgacggacggaccgtcgggaccttttattaccagggcacatacccctgggaggccccaattgacaatgtttatgtcagtgcggggagtcatacagtcgaaatcactgttactgcggataacggcacatgggacgtgtatgccgactacctggtgatacagtgactcgagggggggcccggtacccaattcgccctatagtgagtcgtattacaattcactggccgtcgttttacaacgtcgtgactgggaaaaccctggcgttacccaacttaatcgccttgcagcacatccccctttcgccagctggcgtaatagcgaagaggcccgcaccgatcgcccttcccaacagttgcgcagcctgaatggcgaatggaaattgtaagcgttaatattttgttaaaattcgcgttaaatttttgttaaatcagctcattttttaaccaataggccgaaatcggcaaaatcccttataaatcaaaagaatagaccgagatagggttgagtgttgttccagtttggaacaagagtccactattaaagaacgtggactccaacgtcaaagggcgaaaaaccgtctatcagggcgatggcccactacgtgaaccatcaccctaatcaagttttttggggtcgaggtgccgtaaagcactaaatcggaaccctaaagggagcccccgatttagagcttgacggggaaagccggcgaacgtggcgagaaaggaagggaagaaagcgaaaggagcgggcgctagggcgctggcaagtgtagcggtcacgctgcgcgtaaccaccacacccgccgcgcttaatgcgccgctacagggcgcgtcaggtg

SEQ ID NO: 3192 - DNA, 5462 bp, Artificial Sequence
  Synthetic Construct, AT-35 intein modified protein encoding nucleic acids in pBluescript
gcacttttcggggaaatgtgcgcggaacccctatttgtttatttttctaaatacattcaaatatgtatccgctcatgagacaataaccctgataaatgcttcaataatattgaaaaaggaagagtatgagtattcaacatttccgtgtcgcccttattcccttttttgcggcattttgccttcctgtttttgctcacccagaaacgctggtgaaagtaaaagatgctgaagatcagttgggtgcacgagtgggttacatcgaactggatctcaacagcggtaagatccttgagagttttcgccccgaagaacgttttccaatgatgagcacttttaaagttctgctatgtggcgcggtattatcccgtattgacgccgggcaagagcaactcggtcgccgcatacactattctcagaatgacttggttgagtactcaccagtcacagaaaagcatcttacggatggcatgacagtaagagaattatgcagtgctgccataaccatgagtgataacactgcggccaacttacttctgacaacgatcggaggaccgaaggagctaaccgcttttttgcacaacatgggggatcatgtaactcgccttgatcgttgggaaccggagctgaatgaagccataccaaacgacgagcgtgacaccacgatgcctgtagcaatggcaacaacgttgcgcaaactattaactggcgaactacttactctagcttcccggcaacaattaatagactggatggaggcggataaagttgcaggaccacttctgcgctcggcccttccggctggctggtttattgctgataaatctggagccggtgagcgtgggtctcgcggtatcattgcagcactggggccagatggtaagccctcccgtatcgtagttatctacacgacggggagtcaggcaactatggatgaacgaaatagacagatcgctgagataggtgcctcactgattaagcattggtaactgtcagaccaagtttactcatatatactttagattgatttaaaacttcatttttaatttaaaaggatctaggtgaagatcctttttgataatctcatgaccaaaatcccttaacgtgagttttcgttccactgagcgtcagaccccgtagaaaagatcaaaggatcttcttgagatcctttttttctgcgcgtaatctgctgcttgcaaacaaaaaaaccaccgctaccagcggtggtttgtttgccggatcaagagctaccaactctttttccgaaggtaactggcttcagcagagcgcagataccaaatactgtccttctagtgtagccgtagttaggccaccacttcaagaactctgtagcaccgcctacatacctcgctctgctaatcctgttaccagtggctgctgccagtggcgataagtcgtgtcttaccgggttggactcaagacgatagttaccggataaggcgcagcggtcgggctgaacggggggttcgtgcacacagcccagcttggagcgaacgacctacaccgaactgagatacctacagcgtgagctatgagaaagcgccacgcttcccgaagggagaaaggcggacaggtatccggtaagcggcagggtcggaacaggagagcgcacgagggagcttccagggggaaacgcctggtatctttatagtcctgtcgggtttcgccacctctgacttgagcgtcgatttttgtgatgctcgtcaggggggcggagcctatggaaaaacgccagcaacgcggcctttttacggttcctggccttttgctggccttttgctcacatgttctttcctgcgttatcccctgattctgtggataaccgtattaccgcctttgagtgagctgataccgctcgccgcagccgaacgaccgagcgcagcgagtcagtgagcgaggaagcggaagagcgcccaatacgcaaaccgcctctccccgcgcgttggccgattcattaatgcagctggcacgacaggtttcccgactggaaagcgggcagtgagcgcaacgcaattaatgtgagttagctcactcattaggcaccccaggctttacactttatgcttccggctcgtatgttgtgtggaattgtgagcggataacaatttcacacaggaaacagcatatgcaaacaagcattactctgacatccaacgcatccggtacgtttgacggttactattacgaactctggaaggatactggcaatacaacaatgacggtctacactcaaggtcgcttttcctgccagtggtcgaacatcaataacgcgttgtttaggaccgggaagaaatacaaccagaattggcagtctcttggcacaatccggatcacgtactctgcgacttacaacccaaacgggaactcctacttgtgtatctatggctggtctaccaacccattggtcgagttctacatcgttgagtcctgggggaactggagaccgcctggtgcctcggtcgctgcggactcgcggctggtcgctgtttcgccggatgacaagatcgttttcactactattgaggatttctggaagaagctgaacacgccaatcgagcgcaatgggaagttccggaagcgcacatgcgtctctgagggctggcagacttacgctttcgacgagaaccacgaggcctcactgaggcctatcgagaaggcgattcggtacaccgctgatgagtctgagcagctcaggaggatcaccacgcagctcggcaggtcgctggacattacggatgagcactctctgttccgctacgacgatggcatcgaggaggtggctggggacgatctgaccgctggcgacatcattgtcgcgccgaggaccctcgatgttgaggtgacgcagacaactctcgacctgtccgagtacatccacgataacgagaggtgcccaagcgagcagaccggctcgggggagctcaatctggcctccaagagcgcgatctcggactctaggaacaaggagaccccgggcgtgacgcataatatcctcccccagcggagcaagttcaccgacgagatgaccacgctctcaccaacggctgttggcgggctggagtccgagcagaacgagaccctcagggtcggcgagagcacgggggccatcgagaggtacattaatgtggacgattcgttcggctggctcctggggcagttcatcgcgcagaggtcaatttccacagacgctctgaccatgacggtccacactgccgcggagaagcatgccgagcggatcgttgcgaccagcgactcggtgttcgggattaagccaacggtgaactccatcgagcgcggctacgagattgtgttcccttccgtcttcgacacaatcgtcagcggcctcactgcgaaggagcagagcgagcccgagcaggacgtggatcacacacatactgacgagatcggcattccggagtgcatcctgcacgcccccgacgatattgtcctctccttcctgcaggggttcatcctcgcggagaacgctcagcggaagggcaatgctgcctccgaggccagcgagatggtctctgagtcagagacaactgttaccctggagacgccatcggtcggcgttaaggacgggctcgtgttcctgtgccacaggctcggggtcatcacggatatttcggagaagtctggcgaggagtacagcgttcatttcgaggagtctcgctacacagtgtcaatcgccacagagggcaagactaaccccctcgaccagatcctgaatggggagaggccaacaatgcctgagggcgtgagcgtcccagttccagatgctctcctgactatccacgagtcaattgccaactccccacatatcgaccaggtcattcctgataccgtggtccagcaggagacagtttccctggagactctgcagagcctcctgaccggcctgtcgacggtggacctcccagctcagctggaggctaagcgcgacgagctcacactcctgactgagggcgatctctcttacctgagggtggagtcagtcgagtgcgttgactacgatggctacctgtacgatctccaggttgggggggagccagttttcacagctaattggctctacgctcataatacgtccctgggccaagtgacaatcgatggcgggacctacgacatctataggacgacacgcgtcaaccagccttccattgtggggacagccacgttcgatcagtactggagcgtgcgcacctctaagcggacttcaggaacagtgaccgtgaccgatcacttccgcgcctgggcgaaccggggcctgaacctcggcacaatagaccaaattacattgtgcgtggagggttaccaaagctctggatcagccaacatcacccagaacaccttctctcagggctcttcttccggcagttcgggtggctcatccggctccacaacgactactcgcatcgagtgtgagaacatgtccttgtccggaccctacgttagcaggatcaccaatccctttaatggtattgcgctgtacgccaacggagacacagcccgcgctaccgttaacttccccgcaagtcgcaactacaatttccgcctgcggggttgcggcaacaacaataatcttgcccgtgtggacctgaggatcgacggacggaccgtcgggaccttttattaccagggcacatacccctgggaggccccaattgacaatgtttatgtcagtgcggggagtcatacagtcgaaatcactgttactgcggataacggcacatgggacgtgtatgccgactacctggtgatacagtgactcgagggggggcccggtacccaattcgccctatagtgagtcgtattacaattcactggccgtcgttttacaacgtcgtgactgggaaaaccctggcgttacccaacttaatcgccttgcagcacatccccctttcgccagctggcgtaatagcgaagaggcccgcaccgatcgcccttcccaacagttgcgcagcctgaatggcgaatggaaattgtaagcgttaatattttgttaaaattcgcgttaaatttttgttaaatcagctcattttttaaccaataggccgaaatcggcaaaatcccttataaatcaaaagaatagaccgagatagggttgagtgttgttccagtttggaacaagagtccactattaaagaacgtggactccaacgtcaaagggcgaaaaaccgtctatcagggcgatggcccactacgtgaaccatcaccctaatcaagttttttggggtcgaggtgccgtaaagcactaaatcggaaccctaaagggagcccccgatttagagcttgacggggaaagccggcgaacgtggcgagaaaggaagggaagaaagcgaaaggagcgggcgctagggcgctggcaagtgtagcggtcacgctgcgcgtaaccaccacacccgccgcgcttaatgcgccgctacagggcgcgtcaggtg

SEQ ID NO: 3193 - DNA, 5054 bp, Artificial Sequence
  Synthetic Construct, AT-36 intein modified protein encoding nucleic acids in pBluescript
gcacttttcggggaaatgtgcgcggaacccctatttgtttatttttctaaatacattcaaatatgtatccgctcatgagacaataaccctgataaatgcttcaataatattgaaaaaggaagagtatgagtattcaacatttccgtgtcgcccttattcccttttttgcggcattttgccttcctgtttttgctcacccagaaacgctggtgaaagtaaaagatgctgaagatcagttgggtgcacgagtgggttacatcgaactggatctcaacagcggtaagatccttgagagttttcgccccgaagaacgttttccaatgatgagcacttttaaagttctgctatgtggcgcggtattatcccgtattgacgccgggcaagagcaactcggtcgccgcatacactattctcagaatgacttggttgagtactcaccagtcacagaaaagcatcttacggatggcatgacagtaagagaattatgcagtgctgccataaccatgagtgataacactgcggccaacttacttctgacaacgatcggaggaccgaaggagctaaccgcttttttgcacaacatgggggatcatgtaactcgccttgatcgttgggaaccggagctgaatgaagccataccaaacgacgagcgtgacaccacgatgcctgtagcaatggcaacaacgttgcgcaaactattaactggcgaactacttactctagcttcccggcaacaattaatagactggatggaggcggataaagttgcaggaccacttctgcgctcggcccttccggctggctggtttattgctgataaatctggagccggtgagcgtgggtctcgcggtatcattgcagcactggggccagatggtaagccctcccgtatcgtagttatctacacgacggggagtcaggcaactatggatgaacgaaatagacagatcgctgagataggtgcctcactgattaagcattggtaactgtcagaccaagtttactcatatatactttagattgatttaaaacttcatttttaatttaaaaggatctaggtgaagatcctttttgataatctcatgaccaaaatcccttaacgtgagttttcgttccactgagcgtcagaccccgtagaaaagatcaaaggatcttcttgagatcctttttttctgcgcgtaatctgctgcttgcaaacaaaaaaaccaccgctaccagcggtggtttgtttgccggatcaagagctaccaactctttttccgaaggtaactggcttcagcagagcgcagataccaaatactgtccttctagtgtagccgtagttaggccaccacttcaagaactctgtagcaccgcctacatacctcgctctgctaatcctgttaccagtggctgctgccagtggcgataagtcgtgtcttaccgggttggactcaagacgatagttaccggataaggcgcagcggtcgggctgaacggggggttcgtgcacacagcccagcttggagcgaacgacctacaccgaactgagatacctacagcgtgagctatgagaaagcgccacgcttcccgaagggagaaaggcggacaggtatccggtaagcggcagggtcggaacaggagagcgcacgagggagcttccagggggaaacgcctggtatctttatagtcctgtcgggtttcgccacctctgacttgagcgtcgatttttgtgatgctcgtcaggggggcggagcctatggaaaaacgccagcaacgcggcctttttacggttcctggccttttgctggccttttgctcacatgttctttcctgcgttatcccctgattctgtggataaccgtattaccgcctttgagtgagctgataccgctcgccgcagccgaacgaccgagcgcagcgagtcagtgagcgaggaagcggaagagcgcccaatacgcaaaccgcctctccccgcgcgttggccgattcattaatgcagctggcacgacaggtttcccgactggaaagcgggcagtgagcgcaacgcaattaatgtgagttagctcactcattaggcaccccaggctttacactttatgcttccggctcgtatgttgtgtggaattgtgagcggataacaatttcacacaggaaacagcatatgcaaacaagcattactctgacatccaacgcatccggtacgtttgacggttactattacgaactctggaaggatactggcaatacaacaatgacggtctacactcaaggtcgcttttcctgccagtggtcgaacatcaataacgcgttgtttaggaccgggaagaaatacaaccagaattggcagtctcttggcacaatccggatcacgtactctgcgacttacaacccaaacgggaactcctacttgtgtatctatggctggtctaccaacccattggtcgagttctacatcgttgagtcctgggggaactggagaccgcctggtgcctgcctcactgcggactcaacagtcatgctcaaggagaaggggatggtctcggtctcggaggtggagacaggggatcagatcgctcagcgctccgacacaggcttccagtacaagccggtggaggagactcacgcgtacgagaacgctgagacactcactgtcaccctgacgaacggctgctctatccgcgggaccccgaatcacaggctcatggtcgacgatgagtggacgcgcatcgacgagattcagcccgatcaggaggttcattacacactcggctggctgagggagactaaccagtccccgcccaagctccactctcagtcacataccacggtgaatcagacagctgactccatcagcccggattccagcgagcccattgagctgtcggagtctgagaacgcggacacgggcaacaggcacaattctgctgttgccgtgaagcagtcacggacacagactcagctgatcagcgacgaggtggtctcgcggccagagcacaccaggaggcctgatcagctctccgaggagctggctgagctcctgggcctctggatcgacacggggctgtggcatcagagcggcgtccagttcaacgttgagcgcgagaatatcgcggagtacattgaccagctctcacagcagctgttcgataccccagctgctatctccgacacggatggcacctacacggtggacattacagatcataagctcaaggagtggtggaaggctaacttcggcgggaagccagacggcactcagtcgtcttacgtcccacagatgatcaaggaggcccctacaaatgttattgaggcgttcctgagggggtgcttcactgctgagggcgggctcaggaaggacatgaggccacggctgtgcacctcatccgaggatagcatcgacgatattgcggtcctcatgatgggcctggggtaccctgtggagaagtcggtcatcaggaacgctgacggcgagccgtactactcggttatgcccgctaccgacgatgggctctctgccttcctgcacgacgtgggcttcatcgatgagcggcgcgagatcgggctctccaacattgagagctcggatagccgggccctgaacaatacccataagatcgaggttgagtcaattgtggagtccccacctgcgacggtctacgacattacagtggcggataatcatgagtacgttacagatggcatcatttcacacaacacgtccctgggccaagtgacaatcgatggcgggacctacgacatctataggacgacacgcgtcaaccagccttccattgtggggacagccacgttcgatcagtactggagcgtgcgcacctctaagcggacttcaggaacagtgaccgtgaccgatcacttccgcgcctgggcgaaccggggcctgaacctcggcacaatagaccaaattacattgtgcgtggagggttaccaaagctctggatcagccaacatcacccagaacaccttctctcagggctcttcttccggcagttcgggtggctcatccggctccacaacgactactcgcatcgagtgtgagaacatgtccttgtccggaccctacgttagcaggatcaccaatccctttaatggtattgcgctgtacgccaacggagacacagcccgcgctaccgttaacttccccgcaagtcgcaactacaatttccgcctgcggggttgcggcaacaacaataatcttgcccgtgtggacctgaggatcgacggacggaccgtcgggaccttttattaccagggcacatacccctgggaggccccaattgacaatgtttatgtcagtgcggggagtcatacagtcgaaatcactgttactgcggataacggcacatgggacgtgtatgccgactacctggtgatacagtgactcgagggggggcccggtacccaattcgccctatagtgagtcgtattacaattcactggccgtcgttttacaacgtcgtgactgggaaaaccctggcgttacccaacttaatcgccttgcagcacatccccctttcgccagctggcgtaatagcgaagaggcccgcaccgatcgcccttcccaacagttgcgcagcctgaatggcgaatggaaattgtaagcgttaatattttgttaaaattcgcgttaaatttttgttaaatcagctcattttttaaccaataggccgaaatcggcaaaatcccttataaatcaaaagaatagaccgagatagggttgagtgttgttccagtttggaacaagagtccactattaaagaacgtggactccaacgtcaaagggcgaaaaaccgtctatcagggcgatggcccactacgtgaaccatcaccctaatcaagttttttggggtcgaggtgccgtaaagcactaaatcggaaccctaaagggagcccccgatttagagcttgacggggaaagccggcgaacgtggcgagaaaggaagggaagaaagcgaaaggagcgggcgctagggcgctggcaagtgtagcggtcacgctgcgcgtaaccaccacacccgccgcgcttaatgcgccgctacagggcgcgtcaggtg

SEQ ID NO: 3194 - DNA, 5144 bp, Artificial Sequence
  Synthetic Construct, AT-37 intein modified protein encoding nucleic acids in pBluescript
gcacttttcggggaaatgtgcgcggaacccctatttgtttatttttctaaatacattcaaatatgtatccgctcatgagacaataaccctgataaatgcttcaataatattgaaaaaggaagagtatgagtattcaacatttccgtgtcgcccttattcccttttttgcggcattttgccttcctgtttttgctcacccagaaacgctggtgaaagtaaaagatgctgaagatcagttgggtgcacgagtgggttacatcgaactggatctcaacagcggtaagatccttgagagttttcgccccgaagaacgttttccaatgatgagcacttttaaagttctgctatgtggcgcggtattatcccgtattgacgccgggcaagagcaactcggtcgccgcatacactattctcagaatgacttggttgagtactcaccagtcacagaaaagcatcttacggatggcatgacagtaagagaattatgcagtgctgccataaccatgagtgataacactgcggccaacttacttctgacaacgatcggaggaccgaaggagctaaccgcttttttgcacaacatgggggatcatgtaactcgccttgatcgttgggaaccggagctgaatgaagccataccaaacgacgagcgtgacaccacgatgcctgtagcaatggcaacaacgttgcgcaaactattaactggcgaactacttactctagcttcccggcaacaattaatagactggatggaggcggataaagttgcaggaccacttctgcgctcggcccttccggctggctggtttattgctgataaatctggagccggtgagcgtgggtctcgcggtatcattgcagcactggggccagatggtaagccctcccgtatcgtagttatctacacgacggggagtcaggcaactatggatgaacgaaatagacagatcgctgagataggtgcctcactgattaagcattggtaactgtcagaccaagtttactcatatatactttagattgatttaaaacttcatttttaatttaaaaggatctaggtgaagatcctttttgataatctcatgaccaaaatcccttaacgtgagttttcgttccactgagcgtcagaccccgtagaaaagatcaaaggatcttcttgagatcctttttttctgcgcgtaatctgctgcttgcaaacaaaaaaaccaccgctaccagcggtggtttgtttgccggatcaagagctaccaactctttttccgaaggtaactggcttcagcagagcgcagataccaaatactgtccttctagtgtagccgtagttaggccaccacttcaagaactctgtagcaccgcctacatacctcgctctgctaatcctgttaccagtggctgctgccagtggcgataagtcgtgtcttaccgggttggactcaagacgatagttaccggataaggcgcagcggtcgggctgaacggggggttcgtgcacacagcccagcttggagcgaacgacctacaccgaactgagatacctacagcgtgagctatgagaaagcgccacgcttcccgaagggagaaaggcggacaggtatccggtaagcggcagggtcggaacaggagagcgcacgagggagcttccagggggaaacgcctggtatctttatagtcctgtcgggtttcgccacctctgacttgagcgtcgatttttgtgatgctcgtcaggggggcggagcctatggaaaaacgccagcaacgcggcctttttacggttcctggccttttgctggccttttgctcacatgttctttcctgcgttatcccctgattctgtggataaccgtattaccgcctttgagtgagctgataccgctcgccgcagccgaacgaccgagcgcagcgagtcagtgagcgaggaagcggaagagcgcccaatacgcaaaccgcctctccccgcgcgttggccgattcattaatgcagctggcacgacaggtttcccgactggaaagcgggcagtgagcgcaacgcaattaatgtgagttagctcactcattaggcaccccaggctttacactttatgcttccggctcgtatgttgtgtggaattgtgagcggataacaatttcacacaggaaacagcatatgcaaacaagcattactctgacatccaacgcatccggtacgtttgacggttactattacgaactctggaaggatactggcaatacaacaatgacggtctacactcaaggtcgcttttcctgccagtggtcgaacatcaataacgcgttgtttaggaccgggaagaaatacaaccagaattggcagtctcttggcacaatccggatcacgtactctgcgacttacaacccaaacgggaactcctacttgtgtatctatggctggtctaccaacccattggtcgagttctacatcgttgagtcctgggggaactggagaccgcctggtgcctgcgtggaggagaatagcctggtttctaccgatgaggggctgcggcctatcaaggatctggacaatactactgcggagttcgagcagtgggacgagatcgatgtcggcgttaccacggacggcgggaccaagacggctacagctgtttacgataacggcttcgccaatgtgcgccagatccagaccgagagcgggttcaacattgctgctaccccaaatcaccggttccgcacgctgtccagcgacggcacttacacctggaaggaggctggcaagttcgagtccggggaccgcgtgatcctgcagaggaacaccttcgatgctggctcccgcgtgtccctggaggctaatgagagggctgacgatgcccaggacacaactgagggcccagagctgccagggaggatgacgtccgagctggccgagttcctcggctacttcatgggcagcgggtacatctcggacgagacccatgcttccgtggatctggtggtcgacagcgatgccacggagctcaactcatacctgtccaatctcggcgagcagctcttcaggattaccccggccgtcgagtctcaggagatgtcacaggttctgtccttccgggactgccacctcagccgctacttcgaggataacggctggaagaagacggacacaggccataatggggatgcttcggctgctttcgtcccagagcagatcctggagggcgacgagcaggttgtgaacggcttcctcaggggggtgttcgaggcgattgggacggtctcggagaagatcgagattctgaccacgtctacaactctggctgaccagctccagagcctcctgctctcgctgggccacgtgttcacccgggatagcacgaagctcgtcgagacaaacaattaccatgacgatcagctgaggcagaggctctgcggcgctactaggagggaggacgagcggttcatgaacgagatcgggtcactcattgagccagatgagctgaacctctccacacgcgcggacaagaatgatacttacccttcgtctgttatcgaccacgtgcagacactggacggctacgattcagtgtccgagagcctcaagtctcgcattaaccagtcacaggtcgacgggacggttagcaggaagctgatcaaggatattgaggcggagactgctgagaccgtctcgatcgccgaccatgagctcacaggcttctacgcggctactgtggagtctgtcacggaggacacagcgtacactaaggatatttcagttccaagcaacaacacatacatcgccgacgggttcgttactcataatacgtccctgggccaagtgacaatcgatggcgggacctacgacatctataggacgacacgcgtcaaccagccttccattgtggggacagccacgttcgatcagtactggagcgtgcgcacctctaagcggacttcaggaacagtgaccgtgaccgatcacttccgcgcctgggcgaaccggggcctgaacctcggcacaatagaccaaattacattgtgcgtggagggttaccaaagctctggatcagccaacatcacccagaacaccttctctcagggctcttcttccggcagttcgggtggctcatccggctccacaacgactactcgcatcgagtgtgagaacatgtccttgtccggaccctacgttagcaggatcaccaatccctttaatggtattgcgctgtacgccaacggagacacagcccgcgctaccgttaacttccccgcaagtcgcaactacaatttccgcctgcggggttgcggcaacaacaataatcttgcccgtgtggacctgaggatcgacggacggaccgtcgggaccttttattaccagggcacatacccctgggaggccccaattgacaatgtttatgtcagtgcggggagtcatacagtcgaaatcactgttactgcggataacggcacatgggacgtgtatgccgactacctggtgatacagtgactcgagggggggcccggtacccaattcgccctatagtgagtcgtattacaattcactggccgtcgttttacaacgtcgtgactgggaaaaccctggcgttacccaacttaatcgccttgcagcacatccccctttcgccagctggcgtaatagcgaagaggcccgcaccgatcgcccttcccaacagttgcgcagcctgaatggcgaatggaaattgtaagcgttaatattttgttaaaattcgcgttaaatttttgttaaatcagctcattttttaaccaataggccgaaatcggcaaaatcccttataaatcaaaagaatagaccgagatagggttgagtgttgttccagtttggaacaagagtccactattaaagaacgtggactccaacgtcaaagggcgaaaaaccgtctatcagggcgatggcccactacgtgaaccatcaccctaatcaagttttttggggtcgaggtgccgtaaagcactaaatcggaaccctaaagggagcccccgatttagagcttgacggggaaagccggcgaacgtggcgagaaaggaagggaagaaagcgaaaggagcgggcgctagggcgctggcaagtgtagcggtcacgctgcgcgtaaccaccacacccgccgcgcttaatgcgccgctacagggcgcgtcaggtg

SEQ ID NO: 3195 - DNA, 4472 bp, Artificial Sequence
  Synthetic Construct, AT-38 intein modified protein encoding nucleic acids in pBluescript
gcacttttcggggaaatgtgcgcggaacccctatttgtttatttttctaaatacattcaaatatgtatccgctcatgagacaataaccctgataaatgcttcaataatattgaaaaaggaagagtatgagtattcaacatttccgtgtcgcccttattcccttttttgcggcattttgccttcctgtttttgctcacccagaaacgctggtgaaagtaaaagatgctgaagatcagttgggtgcacgagtgggttacatcgaactggatctcaacagcggtaagatccttgagagttttcgccccgaagaacgttttccaatgatgagcacttttaaagttctgctatgtggcgcggtattatcccgtattgacgccgggcaagagcaactcggtcgccgcatacactattctcagaatgacttggttgagtactcaccagtcacagaaaagcatcttacggatggcatgacagtaagagaattatgcagtgctgccataaccatgagtgataacactgcggccaacttacttctgacaacgatcggaggaccgaaggagctaaccgcttttttgcacaacatgggggatcatgtaactcgccttgatcgttgggaaccggagctgaatgaagccataccaaacgacgagcgtgacaccacgatgcctgtagcaatggcaacaacgttgcgcaaactattaactggcgaactacttactctagcttcccggcaacaattaatagactggatggaggcggataaagttgcaggaccacttctgcgctcggcccttccggctggctggtttattgctgataaatctggagccggtgagcgtgggtctcgcggtatcattgcagcactggggccagatggtaagccctcccgtatcgtagttatctacacgacggggagtcaggcaactatggatgaacgaaatagacagatcgctgagataggtgcctcactgattaagcattggtaactgtcagaccaagtttactcatatatactttagattgatttaaaacttcatttttaatttaaaaggatctaggtgaagatcctttttgataatctcatgaccaaaatcccttaacgtgagttttcgttccactgagcgtcagaccccgtagaaaagatcaaaggatcttcttgagatcctttttttctgcgcgtaatctgctgcttgcaaacaaaaaaaccaccgctaccagcggtggtttgtttgccggatcaagagctaccaactctttttccgaaggtaactggcttcagcagagcgcagataccaaatactgtccttctagtgtagccgtagttaggccaccacttcaagaactctgtagcaccgcctacatacctcgctctgctaatcctgttaccagtggctgctgccagtggcgataagtcgtgtcttaccgggttggactcaagacgatagttaccggataaggcgcagcggtcgggctgaacggggggttcgtgcacacagcccagcttggagcgaacgacctacaccgaactgagatacctacagcgtgagctatgagaaagcgccacgcttcccgaagggagaaaggcggacaggtatccggtaagcggcagggtcggaacaggagagcgcacgagggagcttccagggggaaacgcctggtatctttatagtcctgtcgggtttcgccacctctgacttgagcgtcgatttttgtgatgctcgtcaggggggcggagcctatggaaaaacgccagcaacgcggcctttttacggttcctggccttttgctggccttttgctcacatgttctttcctgcgttatcccctgattctgtggataaccgtattaccgcctttgagtgagctgataccgctcgccgcagccgaacgaccgagcgcagcgagtcagtgagcgaggaagcggaagagcgcccaatacgcaaaccgcctctccccgcgcgttggccgattcattaatgcagctggcacgacaggtttcccgactggaaagcgggcagtgagcgcaacgcaattaatgtgagttagctcactcattaggcaccccaggctttacactttatgcttccggctcgtatgttgtgtggaattgtgagcggataacaatttcacacaggaaacagcatatgcaaacaagcattactctgacatccaacgcatccggtacgtttgacggttactattacgaactctggaaggatactggcaatacaacaatgacggtctacactcaaggtcgcttttcctgccagtggtcgaacatcaataacgcgttgtttaggaccgggaagaaatacaaccagaattggcagtctcttggcacaatccggatcacgtactctgcgacttacaacccaaacgggaactcctacttgtgtatctatggctggtctaccaacccattggtcgagttctacatcgttgagtcctgggggaactggagaccgcctggtgcctctattgaggctgatgagtcaatcgttattaggcgggacggggagactgagctgacggagatcgggtcgttcgtggacactattctggccgcggacaaccaggagacccggatcacggatggccacgagattgcgctcgctccgaatgggctggaggttccctccctcgacaccgatgagcagatcaggtggaagcacattgaggcggtgagccggcatgcttcgccagacgagatcctcctgattgagctggagtcaggcaggtccatcagggctaccaaggctcactccttcgtcacgaggagggacggcgatgttctcccagtggctggcgagacactggtggtcggggacgtcctccctactgttggcagctacgatcatgcgtcggggtctatctcagtgccgctgcagtcccagagcgtcgctgctgacggcgggaccgttgagcccaacacaaatatcactgccaacgcggagcgcgattcggcctctattacctctgcgggcatcattgggtcggctacgtgggagaggatctccagcattgagacagtggcgccggagtacgagtatgtgtacgatctctctgtttccgggctggagactttcactacgggggagggggtcgttactcataatacgtccctgggccaagtgacaatcgatggcgggacctacgacatctataggacgacacgcgtcaaccagccttccattgtggggacagccacgttcgatcagtactggagcgtgcgcacctctaagcggacttcaggaacagtgaccgtgaccgatcacttccgcgcctgggcgaaccggggcctgaacctcggcacaatagaccaaattacattgtgcgtggagggttaccaaagctctggatcagccaacatcacccagaacaccttctctcagggctcttcttccggcagttcgggtggctcatccggctccacaacgactactcgcatcgagtgtgagaacatgtccttgtccggaccctacgttagcaggatcaccaatccctttaatggtattgcgctgtacgccaacggagacacagcccgcgctaccgttaacttccccgcaagtcgcaactacaatttccgcctgcggggttgcggcaacaacaataatcttgcccgtgtggacctgaggatcgacggacggaccgtcgggaccttttattaccagggcacatacccctgggaggccccaattgacaatgtttatgtcagtgcggggagtcatacagtcgaaatcactgttactgcggataacggcacatgggacgtgtatgccgactacctggtgatacagtgactcgagggggggcccggtacccaattcgccctatagtgagtcgtattacaattcactggccgtcgttttacaacgtcgtgactgggaaaaccctggcgttacccaacttaatcgccttgcagcacatccccctttcgccagctggcgtaatagcgaagaggcccgcaccgatcgcccttcccaacagttgcgcagcctgaatggcgaatggaaattgtaagcgttaatattttgttaaaattcgcgttaaatttttgttaaatcagctcattttttaaccaataggccgaaatcggcaaaatcccttataaatcaaaagaatagaccgagatagggttgagtgttgttccagtttggaacaagagtccactattaaagaacgtggactccaacgtcaaagggcgaaaaaccgtctatcagggcgatggcccactacgtgaaccatcaccctaatcaagttttttggggtcgaggtgccgtaaagcactaaatcggaaccctaaagggagcccccgatttagagcttgacggggaaagccggcgaacgtggcgagaaaggaagggaagaaagcgaaaggagcgggcgctagggcgctggcaagtgtagcggtcacgctgcgcgtaaccaccacacccgccgcgcttaatgcgccgctacagggcgcgtcaggtg

SEQ ID NO: 3196 - DNA, 5114 bp, Artificial Sequence
  Synthetic Construct, AT-39 intein modified protein encoding nucleic acids in pBluescript
gcacttttcggggaaatgtgcgcggaacccctatttgtttatttttctaaatacattcaaatatgtatccgctcatgagacaataaccctgataaatgcttcaataatattgaaaaaggaagagtatgagtattcaacatttccgtgtcgcccttattcccttttttgcggcattttgccttcctgtttttgctcacccagaaacgctggtgaaagtaaaagatgctgaagatcagttgggtgcacgagtgggttacatcgaactggatctcaacagcggtaagatccttgagagttttcgccccgaagaacgttttccaatgatgagcacttttaaagttctgctatgtggcgcggtattatcccgtattgacgccgggcaagagcaactcggtcgccgcatacactattctcagaatgacttggttgagtactcaccagtcacagaaaagcatcttacggatggcatgacagtaagagaattatgcagtgctgccataaccatgagtgataacactgcggccaacttacttctgacaacgatcggaggaccgaaggagctaaccgcttttttgcacaacatgggggatcatgtaactcgccttgatcgttgggaaccggagctgaatgaagccataccaaacgacgagcgtgacaccacgatgcctgtagcaatggcaacaacgttgcgcaaactattaactggcgaactacttactctagcttcccggcaacaattaatagactggatggaggcggataaagttgcaggaccacttctgcgctcggcccttccggctggctggtttattgctgataaatctggagccggtgagcgtgggtctcgcggtatcattgcagcactggggccagatggtaagccctcccgtatcgtagttatctacacgacggggagtcaggcaactatggatgaacgaaatagacagatcgctgagataggtgcctcactgattaagcattggtaactgtcagaccaagtttactcatatatactttagattgatttaaaacttcatttttaatttaaaaggatctaggtgaagatcctttttgataatctcatgaccaaaatcccttaacgtgagttttcgttccactgagcgtcagaccccgtagaaaagatcaaaggatcttcttgagatcctttttttctgcgcgtaatctgctgcttgcaaacaaaaaaaccaccgctaccagcggtggtttgtttgccggatcaagagctaccaactctttttccgaaggtaactggcttcagcagagcgcagataccaaatactgtccttctagtgtagccgtagttaggccaccacttcaagaactctgtagcaccgcctacatacctcgctctgctaatcctgttaccagtggctgctgccagtggcgataagtcgtgtcttaccgggttggactcaagacgatagttaccggataaggcgcagcggtcgggctgaacggggggttcgtgcacacagcccagcttggagcgaacgacctacaccgaactgagatacctacagcgtgagctatgagaaagcgccacgcttcccgaagggagaaaggcggacaggtatccggtaagcggcagggtcggaacaggagagcgcacgagggagcttccagggggaaacgcctggtatctttatagtcctgtcgggtttcgccacctctgacttgagcgtcgatttttgtgatgctcgtcaggggggcggagcctatggaaaaacgccagcaacgcggcctttttacggttcctggccttttgctggccttttgctcacatgttctttcctgcgttatcccctgattctgtggataaccgtattaccgcctttgagtgagctgataccgctcgccgcagccgaacgaccgagcgcagcgagtcagtgagcgaggaagcggaagagcgcccaatacgcaaaccgcctctccccgcgcgttggccgattcattaatgcagctggcacgacaggtttcccgactggaaagcgggcagtgagcgcaacgcaattaatgtgagttagctcactcattaggcaccccaggctttacactttatgcttccggctcgtatgttgtgtggaattgtgagcggataacaatttcacacaggaaacagcatatgcaaacaagcattactctgacatccaacgcatccggtacgtttgacggttactattacgaactctggaaggatactggcaatacaacaatgacggtctacactcaaggtcgcttttcctgccagtggtcgaacatcaataacgcgttgtttaggaccgggaagaaatacaaccagaattggcagtctcttggcacaatccggatcacgtactctgcgacttacaacccaaacgggaactcctacttgtgtatctatggctggtctaccaacccattggtcgagttctacatcgttgagtcctgggggaactggagaccgcctggtgcctgcctcactgcggggacaagggttctgcgggctgatacgggggcggagactactatgggggagctgttcgcgctgcaggctagggacgttccggtgtggtcactcgacgagtccctgcgctacgtccgcaggcacctcactagggttttcccaaccggggtgaagccagtcttccggctgaggactgctagcggcaagactgtccgcgctaccgctaaccatccattcctcacctacgatgggtggaagcctctcggcgagctgtcggtggctgacaggctggcggttccgaggcacgtgccagctccagagagggtggcttcatggacggacgatcaggtcctcctgctcggccatctcatcggcgatgggtccttcgtcaagaggcagccactccgctacgctagcgttgacgaggctaacctgtcggctgtgacggaggctgctgctaatgccttctccattgtcgcggttcgggacgagtacgctgctgctaggtgcaccacgctcaggctgccagctccttacaggctgacccacggcaggaggaatccactcgctgcttggctggacgagctcggcctgttcgggctcaggagctacgagaagttcgtcccgcaggaggttttccacctgcccaagaggcagatcgctctcttcctgcggcatctctgggcgactgatggctctgtgacgctgacaaggcagtcacgcggcgggaggatctactacgcctcgacatctctccagctgattcaggacgtctccaggctgctcctgcggttcggcattagcacgagggtgcggacaactaccccaaagggggaccacaggcctggctacacactcgatgtttctggcgtggacgatcagaggcggttcctgcaggagatcggcgtccatggggccaggggcgctaccgctgacaggctcctggaggtcatcagggatgtctccgcgaacacgaatgtcgacacagttcccaggcaggtttgggacgatgtgcgcaggctcctggtggagaaggagatgacgcacagggagttcgctgctgctatggggacatcgttcggcgggtccagcctctggaagcatgctccatctcgcgagaggctcggcagggtggcccaggtcctggactcggccgagctcgatgttctggcggtgaacgacgtcctgtgggatgaggtggtcgcgatcgagcctgacggcgaggagcaggtctacgatgctactgttctcggggggcacaacttcgtggcggatggcattgctgttcataatacgtccctgggccaagtgacaatcgatggcgggacctacgacatctataggacgacacgcgtcaaccagccttccattgtggggacagccacgttcgatcagtactggagcgtgcgcacctctaagcggacttcaggaacagtgaccgtgaccgatcacttccgcgcctgggcgaaccggggcctgaacctcggcacaatagaccaaattacattgtgcgtggagggttaccaaagctctggatcagccaacatcacccagaacaccttctctcagggctcttcttccggcagttcgggtggctcatccggctccacaacgactactcgcatcgagtgtgagaacatgtccttgtccggaccctacgttagcaggatcaccaatccctttaatggtattgcgctgtacgccaacggagacacagcccgcgctaccgttaacttccccgcaagtcgcaactacaatttccgcctgcggggttgcggcaacaacaataatcttgcccgtgtggacctgaggatcgacggacggaccgtcgggaccttttattaccagggcacatacccctgggaggccccaattgacaatgtttatgtcagtgcggggagtcatacagtcgaaatcactgttactgcggataacggcacatgggacgtgtatgccgactacctggtgatacagtgactcgagggggggcccggtacccaattcgccctatagtgagtcgtattacaattcactggccgtcgttttacaacgtcgtgactgggaaaaccctggcgttacccaacttaatcgccttgcagcacatccccctttcgccagctggcgtaatagcgaagaggcccgcaccgatcgcccttcccaacagttgcgcagcctgaatggcgaatggaaattgtaagcgttaatattttgttaaaattcgcgttaaatttttgttaaatcagctcattttttaaccaataggccgaaatcggcaaaatcccttataaatcaaaagaatagaccgagatagggttgagtgttgttccagtttggaacaagagtccactattaaagaacgtggactccaacgtcaaagggcgaaaaaccgtctatcagggcgatggcccactacgtgaaccatcaccctaatcaagttttttggggtcgaggtgccgtaaagcactaaatcggaaccctaaagggagcccccgatttagagcttgacggggaaagccggcgaacgtggcgagaaaggaagggaagaaagcgaaaggagcgggcgctagggcgctggcaagtgtagcggtcacgctgcgcgtaaccaccacacccgccgcgcttaatgcgccgctacagggcgcgtcaggtg

SEQ ID NO: 3197 - DNA, 4970 bp, Artificial Sequence
  Synthetic Construct, AT-40 intein modified protein encoding nucleic acids in pBluescript
gcacttttcggggaaatgtgcgcggaacccctatttgtttatttttctaaatacattcaaatatgtatccgctcatgagacaataaccctgataaatgcttcaataatattgaaaaaggaagagtatgagtattcaacatttccgtgtcgcccttattcccttttttgcggcattttgccttcctgtttttgctcacccagaaacgctggtgaaagtaaaagatgctgaagatcagttgggtgcacgagtgggttacatcgaactggatctcaacagcggtaagatccttgagagttttcgccccgaagaacgttttccaatgatgagcacttttaaagttctgctatgtggcgcggtattatcccgtattgacgccgggcaagagcaactcggtcgccgcatacactattctcagaatgacttggttgagtactcaccagtcacagaaaagcatcttacggatggcatgacagtaagagaattatgcagtgctgccataaccatgagtgataacactgcggccaacttacttctgacaacgatcggaggaccgaaggagctaaccgcttttttgcacaacatgggggatcatgtaactcgccttgatcgttgggaaccggagctgaatgaagccataccaaacgacgagcgtgacaccacgatgcctgtagcaatggcaacaacgttgcgcaaactattaactggcgaactacttactctagcttcccggcaacaattaatagactggatggaggcggataaagttgcaggaccacttctgcgctcggcccttccggctggctggtttattgctgataaatctggagccggtgagcgtgggtctcgcggtatcattgcagcactggggccagatggtaagccctcccgtatcgtagttatctacacgacggggagtcaggcaactatggatgaacgaaatagacagatcgctgagataggtgcctcactgattaagcattggtaactgtcagaccaagtttactcatatatactttagattgatttaaaacttcatttttaatttaaaaggatctaggtgaagatcctttttgataatctcatgaccaaaatcccttaacgtgagttttcgttccactgagcgtcagaccccgtagaaaagatcaaaggatcttcttgagatcctttttttctgcgcgtaatctgctgcttgcaaacaaaaaaaccaccgctaccagcggtggtttgtttgccggatcaagagctaccaactctttttccgaaggtaactggcttcagcagagcgcagataccaaatactgtccttctagtgtagccgtagttaggccaccacttcaagaactctgtagcaccgcctacatacctcgctctgctaatcctgttaccagtggctgctgccagtggcgataagtcgtgtcttaccgggttggactcaagacgatagttaccggataaggcgcagcggtcgggctgaacggggggttcgtgcacacagcccagcttggagcgaacgacctacaccgaactgagatacctacagcgtgagctatgagaaagcgccacgcttcccgaagggagaaaggcggacaggtatccggtaagcggcagggtcggaacaggagagcgcacgagggagcttccagggggaaacgcctggtatctttatagtcctgtcgggtttcgccacctctgacttgagcgtcgatttttgtgatgctcgtcaggggggcggagcctatggaaaaacgccagcaacgcggcctttttacggttcctggccttttgctggccttttgctcacatgttctttcctgcgttatcccctgattctgtggataaccgtattaccgcctttgagtgagctgataccgctcgccgcagccgaacgaccgagcgcagcgagtcagtgagcgaggaagcggaagagcgcccaatacgcaaaccgcctctccccgcgcgttggccgattcattaatgcagctggcacgacaggtttcccgactggaaagcgggcagtgagcgcaacgcaattaatgtgagttagctcactcattaggcaccccaggctttacactttatgcttccggctcgtatgttgtgtggaattgtgagcggataacaatttcacacaggaaacagcatatgcaaacaagcattactctgacatccaacgcatccggtacgtttgacggttactattacgaactctggaaggatactggcaatacaacaatgacggtctacactcaaggtcgcttttcctgccagtggtcgaacatcaataacgcgttgtttaggaccgggaagaaatacaaccagaattggcagtctcttggcacaatccggatcacgtactctgcgacttacaacccaaacgggaactcctacttgtgtatctatggctggtctaccaacccattggtcgagttctacatcgttgagtcctgggggaactggagaccgcctggtgcctgcgttacggctgacacatgggttatgacggcctcgggggctaggcaggttcgggatctcattgacaggccattcgaggcggtcgtggacggcgagtgccacccaacagagtcccgcggcttcttcttcactggggataagcctgtgctcaggctgtcgacggctgagggccacacactcaggctgactgcgaaccatccggttctcagggtgtccaagatgaccaggcagctgcgggagacggagtgggttaaggctggcgagctcaggccacacgacaagatcgtcctccacgatcatagggctctgccatcctgggacggcgctcataccgaggctgagggctacctgatcgggctcctgattggcgggggcaccctcacgagggacaaggctatcctgtctatttgggatgctgctgctccaaaggtggctaacgggggcggctcagtcccagctgctggcgtcgccggggttatgagggctgctgagctcgctgctcggaccctgccacaccgcacggacttcaatggctggcagaccacgatggagggcaggggggagtaccacatggctacaggcgccctccatactctcgctctggagctcggcctgacaccaggggataagcgcctcactgcgcctctggagacaacttccagcgctttccacaggggcctcctgagggggatgttcgacgccgatggctcggttcaggggtctcagaggaagggcgtgtccatcaggctcccacagaccgacctcgggaacctgcagacggtccagaggatgctcctgaggctgggcgttgctagcaccattcatcagaataggaggccaggcgggaccaaggtcctcccagatggcgagggcggggctaaggggcactcatgccaggccgcgcatgagctgatcatttccggcgagaatgtggtcaggtacgctgagcggatcggcttcgccgactcggataagatggacaggctcaccgctctcctgcagaggtacaggcacacgaggcatgctgagaggttcatcgcgacagtgcagagcctggaggacgatggcatggaggccgtctacgatgttacagtggcggacgttcatgctttcgatgctaatgggctctacgttcataatacgtccctgggccaagtgacaatcgatggcgggacctacgacatctataggacgacacgcgtcaaccagccttccattgtggggacagccacgttcgatcagtactggagcgtgcgcacctctaagcggacttcaggaacagtgaccgtgaccgatcacttccgcgcctgggcgaaccggggcctgaacctcggcacaatagaccaaattacattgtgcgtggagggttaccaaagctctggatcagccaacatcacccagaacaccttctctcagggctcttcttccggcagttcgggtggctcatccggctccacaacgactactcgcatcgagtgtgagaacatgtccttgtccggaccctacgttagcaggatcaccaatccctttaatggtattgcgctgtacgccaacggagacacagcccgcgctaccgttaacttccccgcaagtcgcaactacaatttccgcctgcggggttgcggcaacaacaataatcttgcccgtgtggacctgaggatcgacggacggaccgtcgggaccttttattaccagggcacatacccctgggaggccccaattgacaatgtttatgtcagtgcggggagtcatacagtcgaaatcactgttactgcggataacggcacatgggacgtgtatgccgactacctggtgatacagtgactcgagggggggcccggtacccaattcgccctatagtgagtcgtattacaattcactggccgtcgttttacaacgtcgtgactgggaaaaccctggcgttacccaacttaatcgccttgcagcacatccccctttcgccagctggcgtaatagcgaagaggcccgcaccgatcgcccttcccaacagttgcgcagcctgaatggcgaatggaaattgtaagcgttaatattttgttaaaattcgcgttaaatttttgttaaatcagctcattttttaaccaataggccgaaatcggcaaaatcccttataaatcaaaagaatagaccgagatagggttgagtgttgttccagtttggaacaagagtccactattaaagaacgtggactccaacgtcaaagggcgaaaaaccgtctatcagggcgatggcccactacgtgaaccatcaccctaatcaagttttttggggtcgaggtgccgtaaagcactaaatcggaaccctaaagggagcccccgatttagagcttgacggggaaagccggcgaacgtggcgagaaaggaagggaagaaagcgaaaggagcgggcgctagggcgctggcaagtgtagcggtcacgctgcgcgtaaccaccacacccgccgcgcttaatgcgccgctacagggcgcgtcaggtg

SEQ ID NO: 3198 - DNA, 4325 bp, Artificial Sequence
  Synthetic Construct, AT-41 intein modified protein encoding nucleic acids in pBluescript
gcacttttcggggaaatgtgcgcggaacccctatttgtttatttttctaaatacattcaaatatgtatccgctcatgagacaataaccctgataaatgcttcaataatattgaaaaaggaagagtatgagtattcaacatttccgtgtcgcccttattcccttttttgcggcattttgccttcctgtttttgctcacccagaaacgctggtgaaagtaaaagatgctgaagatcagttgggtgcacgagtgggttacatcgaactggatctcaacagcggtaagatccttgagagttttcgccccgaagaacgttttccaatgatgagcacttttaaagttctgctatgtggcgcggtattatcccgtattgacgccgggcaagagcaactcggtcgccgcatacactattctcagaatgacttggttgagtactcaccagtcacagaaaagcatcttacggatggcatgacagtaagagaattatgcagtgctgccataaccatgagtgataacactgcggccaacttacttctgacaacgatcggaggaccgaaggagctaaccgcttttttgcacaacatgggggatcatgtaactcgccttgatcgttgggaaccggagctgaatgaagccataccaaacgacgagcgtgacaccacgatgcctgtagcaatggcaacaacgttgcgcaaactattaactggcgaactacttactctagcttcccggcaacaattaatagactggatggaggcggataaagttgcaggaccacttctgcgctcggcccttccggctggctggtttattgctgataaatctggagccggtgagcgtgggtctcgcggtatcattgcagcactggggccagatggtaagccctcccgtatcgtagttatctacacgacggggagtcaggcaactatggatgaacgaaatagacagatcgctgagataggtgcctcactgattaagcattggtaactgtcagaccaagtttactcatatatactttagattgatttaaaacttcatttttaatttaaaaggatctaggtgaagatcctttttgataatctcatgaccaaaatcccttaacgtgagttttcgttccactgagcgtcagaccccgtagaaaagatcaaaggatcttcttgagatcctttttttctgcgcgtaatctgctgcttgcaaacaaaaaaaccaccgctaccagcggtggtttgtttgccggatcaagagctaccaactctttttccgaaggtaactggcttcagcagagcgcagataccaaatactgtccttctagtgtagccgtagttaggccaccacttcaagaactctgtagcaccgcctacatacctcgctctgctaatcctgttaccagtggctgctgccagtggcgataagtcgtgtcttaccgggttggactcaagacgatagttaccggataaggcgcagcggtcgggctgaacggggggttcgtgcacacagcccagcttggagcgaacgacctacaccgaactgagatacctacagcgtgagctatgagaaagcgccacgcttcccgaagggagaaaggcggacaggtatccggtaagcggcagggtcggaacaggagagcgcacgagggagcttccagggggaaacgcctggtatctttatagtcctgtcgggtttcgccacctctgacttgagcgtcgatttttgtgatgctcgtcaggggggcggagcctatggaaaaacgccagcaacgcggcctttttacggttcctggccttttgctggccttttgctcacatgttctttcctgcgttatcccctgattctgtggataaccgtattaccgcctttgagtgagctgataccgctcgccgcagccgaacgaccgagcgcagcgagtcagtgagcgaggaagcggaagagcgcccaatacgcaaaccgcctctccccgcgcgttggccgattcattaatgcagctggcacgacaggtttcccgactggaaagcgggcagtgagcgcaacgcaattaatgtgagttagctcactcattaggcaccccaggctttacactttatgcttccggctcgtatgttgtgtggaattgtgagcggataacaatttcacacaggaaacagcatatgcaaacaagcattactctgacatccaacgcatccggtacgtttgacggttactattacgaactctggaaggatactggcaatacaacaatgacggtctacactcaaggtcgcttttcctgccagtggtcgaacatcaataacgcgttgtttaggaccgggaagaaatacaaccagaattggcagtctcttggcacaatccggatcacgtactctgcgacttacaacccaaacgggaactcctacttgtgtatctatggctggtctaccaacccattggtcgagttctacatcgttgagtcctgggggaactggagaccgcctggtgcctgcttcgcgggggacactgagattactgtttcggacgggcggcgctggatgtcgctccctattaggcagttcgttactgagaatttcgacatctcaaagccgggcctcgatcacgttgggacattctactccgacccaaggcagccattctacgtccgctcgattgattctcagggcaagacaagcctcaagcgggtgacttccgtcagcgttcacagggctccagctcatctggtccggttcgctaccaggagggggagggtcctcaccgttacgcctgaccatgcgatgctggtgtgggacacggattacctccgcaagatcaaggctctggaggtggctgtcggcgacagggttccagtggaggagggcgggctcgtggtcgctgatgaggttgtgtctagggagacggtgcaggctctggacgatcgggtctactgcctcactgtggcggagaatcatactctcgttgctaatggcatcttctgcgggcagacgtccctgggccaagtgacaatcgatggcgggacctacgacatctataggacgacacgcgtcaaccagccttccattgtggggacagccacgttcgatcagtactggagcgtgcgcacctctaagcggacttcaggaacagtgaccgtgaccgatcacttccgcgcctgggcgaaccggggcctgaacctcggcacaatagaccaaattacattgtgcgtggagggttaccaaagctctggatcagccaacatcacccagaacaccttctctcagggctcttcttccggcagttcgggtggctcatccggctccacaacgactactcgcatcgagtgtgagaacatgtccttgtccggaccctacgttagcaggatcaccaatccctttaatggtattgcgctgtacgccaacggagacacagcccgcgctaccgttaacttccccgcaagtcgcaactacaatttccgcctgcggggttgcggcaacaacaataatcttgcccgtgtggacctgaggatcgacggacggaccgtcgggaccttttattaccagggcacatacccctgggaggccccaattgacaatgtttatgtcagtgcggggagtcatacagtcgaaatcactgttactgcggataacggcacatgggacgtgtatgccgactacctggtgatacagtgactcgagggggggcccggtacccaattcgccctatagtgagtcgtattacaattcactggccgtcgttttacaacgtcgtgactgggaaaaccctggcgttacccaacttaatcgccttgcagcacatccccctttcgccagctggcgtaatagcgaagaggcccgcaccgatcgcccttcccaacagttgcgcagcctgaatggcgaatggaaattgtaagcgttaatattttgttaaaattcgcgttaaatttttgttaaatcagctcattttttaaccaataggccgaaatcggcaaaatcccttataaatcaaaagaatagaccgagatagggttgagtgttgttccagtttggaacaagagtccactattaaagaacgtggactccaacgtcaaagggcgaaaaaccgtctatcagggcgatggcccactacgtgaaccatcaccctaatcaagttttttggggtcgaggtgccgtaaagcactaaatcggaaccctaaagggagcccccgatttagagcttgacggggaaagccggcgaacgtggcgagaaaggaagggaagaaagcgaaaggagcgggcgctagggcgctggcaagtgtagcggtcacgctgcgcgtaaccaccacacccgccgcgcttaatgcgccgctacagggcgcgtcaggtg

SEQ ID NO: 3199 - DNA, 4640 bp, Artificial Sequence
  Synthetic Construct, AT-42 intein modified protein encoding nucleic acids in pBluescript
gcacttttcggggaaatgtgcgcggaacccctatttgtttatttttctaaatacattcaaatatgtatccgctcatgagacaataaccctgataaatgcttcaataatattgaaaaaggaagagtatgagtattcaacatttccgtgtcgcccttattcccttttttgcggcattttgccttcctgtttttgctcacccagaaacgctggtgaaagtaaaagatgctgaagatcagttgggtgcacgagtgggttacatcgaactggatctcaacagcggtaagatccttgagagttttcgccccgaagaacgttttccaatgatgagcacttttaaagttctgctatgtggcgcggtattatcccgtattgacgccgggcaagagcaactcggtcgccgcatacactattctcagaatgacttggttgagtactcaccagtcacagaaaagcatcttacggatggcatgacagtaagagaattatgcagtgctgccataaccatgagtgataacactgcggccaacttacttctgacaacgatcggaggaccgaaggagctaaccgcttttttgcacaacatgggggatcatgtaactcgccttgatcgttgggaaccggagctgaatgaagccataccaaacgacgagcgtgacaccacgatgcctgtagcaatggcaacaacgttgcgcaaactattaactggcgaactacttactctagcttcccggcaacaattaatagactggatggaggcggataaagttgcaggaccacttctgcgctcggcccttccggctggctggtttattgctgataaatctggagccggtgagcgtgggtctcgcggtatcattgcagcactggggccagatggtaagccctcccgtatcgtagttatctacacgacggggagtcaggcaactatggatgaacgaaatagacagatcgctgagataggtgcctcactgattaagcattggtaactgtcagaccaagtttactcatatatactttagattgatttaaaacttcatttttaatttaaaaggatctaggtgaagatcctttttgataatctcatgaccaaaatcccttaacgtgagttttcgttccactgagcgtcagaccccgtagaaaagatcaaaggatcttcttgagatcctttttttctgcgcgtaatctgctgcttgcaaacaaaaaaaccaccgctaccagcggtggtttgtttgccggatcaagagctaccaactctttttccgaaggtaactggcttcagcagagcgcagataccaaatactgtccttctagtgtagccgtagttaggccaccacttcaagaactctgtagcaccgcctacatacctcgctctgctaatcctgttaccagtggctgctgccagtggcgataagtcgtgtcttaccgggttggactcaagacgatagttaccggataaggcgcagcggtcgggctgaacggggggttcgtgcacacagcccagcttggagcgaacgacctacaccgaactgagatacctacagcgtgagctatgagaaagcgccacgcttcccgaagggagaaaggcggacaggtatccggtaagcggcagggtcggaacaggagagcgcacgagggagcttccagggggaaacgcctggtatctttatagtcctgtcgggtttcgccacctctgacttgagcgtcgatttttgtgatgctcgtcaggggggcggagcctatggaaaaacgccagcaacgcggcctttttacggttcctggccttttgctggccttttgctcacatgttctttcctgcgttatcccctgattctgtggataaccgtattaccgcctttgagtgagctgataccgctcgccgcagccgaacgaccgagcgcagcgagtcagtgagcgaggaagcggaagagcgcccaatacgcaaaccgcctctccccgcgcgttggccgattcattaatgcagctggcacgacaggtttcccgactggaaagcgggcagtgagcgcaacgcaattaatgtgagttagctcactcattaggcaccccaggctttacactttatgcttccggctcgtatgttgtgtggaattgtgagcggataacaatttcacacaggaaacagcatatgcaaacaagcattactctgacatccaacgcatccggtacgtttgacggttactattacgaactctggaaggatactggcaatacaacaatgacggtctacactcaaggtcgcttttcctgccagtggtcgaacatcaataacgcgttgtttaggaccgggaagaaatacaaccagaattggcagtctcttggcacaatccggatcacgtactctgcgacttacaacccaaacgggaactcctacttgtgtatctatggctggtctaccaacccattggtcgagttctacatcgttgagtcctgggggaactggagaccgcctggtgcctgcttcgctgcgggcactctcatcaagacaccaaaggggcctgttcctattgagcagattcagtcgggggatctcgttttcaatgcgatcggcattggggtggtcgagggcatcgtgtgccagcagaagcagaccattacgctggagctgtctgacggcacatcaatcgtctgcactcacgatcatccattcttctgccctcgcggctgggtcgctgctggcgacctggaggttggctccgggctgttcagccacgaggatctccgcaggctgtggtcgggcggggcttctctcggcctggagtccgggtccagcgacggcaggggggctgttcgctcgtctgaggtgctcctgaggatcctcagggaggaggctcgcgagccagatgctggctactgcgggccagccgaggacgtgcgcaacgcgtctaccgatagggctcatgctgagggcgcttggtggcagtggcaggctgacccgattgcgtcagatgaggctgctaggtccgctggcaggagggtcgctgaccgcgttagggacgaggataggagggaggctaggccagagccaaccgctgtcctcctgcaggacaggcactgcgagccactggctaacgatcggaataggagcggcagggagcattcatcccggggcacgggggaggctgagggccagcggcagggggacgtgccatgctcggtccgcgttgtgagcatctcgcgcgaggagaggggcgggcctgaggcggtgtacaacctcagggtttcagggcatccaagctacttcgctgggggggttctcgttcataatacgtccctgggccaagtgacaatcgatggcgggacctacgacatctataggacgacacgcgtcaaccagccttccattgtggggacagccacgttcgatcagtactggagcgtgcgcacctctaagcggacttcaggaacagtgaccgtgaccgatcacttccgcgcctgggcgaaccggggcctgaacctcggcacaatagaccaaattacattgtgcgtggagggttaccaaagctctggatcagccaacatcacccagaacaccttctctcagggctcttcttccggcagttcgggtggctcatccggctccacaacgactactcgcatcgagtgtgagaacatgtccttgtccggaccctacgttagcaggatcaccaatccctttaatggtattgcgctgtacgccaacggagacacagcccgcgctaccgttaacttccccgcaagtcgcaactacaatttccgcctgcggggttgcggcaacaacaataatcttgcccgtgtggacctgaggatcgacggacggaccgtcgggaccttttattaccagggcacatacccctgggaggccccaattgacaatgtttatgtcagtgcggggagtcatacagtcgaaatcactgttactgcggataacggcacatgggacgtgtatgccgactacctggtgatacagtgactcgagggggggcccggtacccaattcgccctatagtgagtcgtattacaattcactggccgtcgttttacaacgtcgtgactgggaaaaccctggcgttacccaacttaatcgccttgcagcacatccccctttcgccagctggcgtaatagcgaagaggcccgcaccgatcgcccttcccaacagttgcgcagcctgaatggcgaatggaaattgtaagcgttaatattttgttaaaattcgcgttaaatttttgttaaatcagctcattttttaaccaataggccgaaatcggcaaaatcccttataaatcaaaagaatagaccgagatagggttgagtgttgttccagtttggaacaagagtccactattaaagaacgtggactccaacgtcaaagggcgaaaaaccgtctatcagggcgatggcccactacgtgaaccatcaccctaatcaagttttttggggtcgaggtgccgtaaagcactaaatcggaaccctaaagggagcccccgatttagagcttgacggggaaagccggcgaacgtggcgagaaaggaagggaagaaagcgaaaggagcgggcgctagggcgctggcaagtgtagcggtcacgctgcgcgtaaccaccacacccgccgcgcttaatgcgccgctacagggcgcgtcaggtg

SEQ ID NO: 3200 - DNA, 4325 bp, Artificial Sequence
  Synthetic Construct, AT-43 intein modified protein encoding nucleic acids in pBluescript
gcacttttcggggaaatgtgcgcggaacccctatttgtttatttttctaaatacattcaaatatgtatccgctcatgagacaataaccctgataaatgcttcaataatattgaaaaaggaagagtatgagtattcaacatttccgtgtcgcccttattcccttttttgcggcattttgccttcctgtttttgctcacccagaaacgctggtgaaagtaaaagatgctgaagatcagttgggtgcacgagtgggttacatcgaactggatctcaacagcggtaagatccttgagagttttcgccccgaagaacgttttccaatgatgagcacttttaaagttctgctatgtggcgcggtattatcccgtattgacgccgggcaagagcaactcggtcgccgcatacactattctcagaatgacttggttgagtactcaccagtcacagaaaagcatcttacggatggcatgacagtaagagaattatgcagtgctgccataaccatgagtgataacactgcggccaacttacttctgacaacgatcggaggaccgaaggagctaaccgcttttttgcacaacatgggggatcatgtaactcgccttgatcgttgggaaccggagctgaatgaagccataccaaacgacgagcgtgacaccacgatgcctgtagcaatggcaacaacgttgcgcaaactattaactggcgaactacttactctagcttcccggcaacaattaatagactggatggaggcggataaagttgcaggaccacttctgcgctcggcccttccggctggctggtttattgctgataaatctggagccggtgagcgtgggtctcgcggtatcattgcagcactggggccagatggtaagccctcccgtatcgtagttatctacacgacggggagtcaggcaactatggatgaacgaaatagacagatcgctgagataggtgcctcactgattaagcattggtaactgtcagaccaagtttactcatatatactttagattgatttaaaacttcatttttaatttaaaaggatctaggtgaagatcctttttgataatctcatgaccaaaatcccttaacgtgagttttcgttccactgagcgtcagaccccgtagaaaagatcaaaggatcttcttgagatcctttttttctgcgcgtaatctgctgcttgcaaacaaaaaaaccaccgctaccagcggtggtttgtttgccggatcaagagctaccaactctttttccgaaggtaactggcttcagcagagcgcagataccaaatactgtccttctagtgtagccgtagttaggccaccacttcaagaactctgtagcaccgcctacatacctcgctctgctaatcctgttaccagtggctgctgccagtggcgataagtcgtgtcttaccgggttggactcaagacgatagttaccggataaggcgcagcggtcgggctgaacggggggttcgtgcacacagcccagcttggagcgaacgacctacaccgaactgagatacctacagcgtgagctatgagaaagcgccacgcttcccgaagggagaaaggcggacaggtatccggtaagcggcagggtcggaacaggagagcgcacgagggagcttccagggggaaacgcctggtatctttatagtcctgtcgggtttcgccacctctgacttgagcgtcgatttttgtgatgctcgtcaggggggcggagcctatggaaaaacgccagcaacgcggcctttttacggttcctggccttttgctggccttttgctcacatgttctttcctgcgttatcccctgattctgtggataaccgtattaccgcctttgagtgagctgataccgctcgccgcagccgaacgaccgagcgcagcgagtcagtgagcgaggaagcggaagagcgcccaatacgcaaaccgcctctccccgcgcgttggccgattcattaatgcagctggcacgacaggtttcccgactggaaagcgggcagtgagcgcaacgcaattaatgtgagttagctcactcattaggcaccccaggctttacactttatgcttccggctcgtatgttgtgtggaattgtgagcggataacaatttcacacaggaaacagcatatgcaaacaagcattactctgacatccaacgcatccggtacgtttgacggttactattacgaactctggaaggatactggcaatacaacaatgacggtctacactcaaggtcgcttttcctgccagtggtcgaacatcaataacgcgttgtttaggaccgggaagaaatacaaccagaattggcagtctcttggcacaatccggatcacgtactctgcgacttacaacccaaacgggaactcctacttgtgtatctatggctggtctaccaacccattggtcgagttctacatcgttgagtcctgggggaactggagaccgcctggtgcctgcttccatggggacacactcattgagatctacgctgacggcattctggaggagattccgatcaggcggttcgttctggagcatctggatctctcgcaggctggcgtggacgctctggggacgttctacgctgatccggtccggccagctcacgtgcgctccgtcgacacaggcgggatcccacacctccgcaagattacttccgttagcgtgcataaggcccctgcgaacctgatccagttctcgacctctaggggcaagaatctcctggtgacgccggatcatgctatgctcgtttgggacgtgtcctacctccgcaagatcagggccctggaggtcaagattggcgacgctgtcccagtttgggagtcaggggtggtcatctccgacaggatcgtcagcattgattacgttccctgcgaggacgagcgggtgtactgcctcactgtggatagggatcataatgttgtgggcaatggcatcttcactgggcagacgtccctgggccaagtgacaatcgatggcgggacctacgacatctataggacgacacgcgtcaaccagccttccattgtggggacagccacgttcgatcagtactggagcgtgcgcacctctaagcggacttcaggaacagtgaccgtgaccgatcacttccgcgcctgggcgaaccggggcctgaacctcggcacaatagaccaaattacattgtgcgtggagggttaccaaagctctggatcagccaacatcacccagaacaccttctctcagggctcttcttccggcagttcgggtggctcatccggctccacaacgactactcgcatcgagtgtgagaacatgtccttgtccggaccctacgttagcaggatcaccaatccctttaatggtattgcgctgtacgccaacggagacacagcccgcgctaccgttaacttccccgcaagtcgcaactacaatttccgcctgcggggttgcggcaacaacaataatcttgcccgtgtggacctgaggatcgacggacggaccgtcgggaccttttattaccagggcacatacccctgggaggccccaattgacaatgtttatgtcagtgcggggagtcatacagtcgaaatcactgttactgcggataacggcacatgggacgtgtatgccgactacctggtgatacagtgactcgagggggggcccggtacccaattcgccctatagtgagtcgtattacaattcactggccgtcgttttacaacgtcgtgactgggaaaaccctggcgttacccaacttaatcgccttgcagcacatccccctttcgccagctggcgtaatagcgaagaggcccgcaccgatcgcccttcccaacagttgcgcagcctgaatggcgaatggaaattgtaagcgttaatattttgttaaaattcgcgttaaatttttgttaaatcagctcattttttaaccaataggccgaaatcggcaaaatcccttataaatcaaaagaatagaccgagatagggttgagtgttgttccagtttggaacaagagtccactattaaagaacgtggactccaacgtcaaagggcgaaaaaccgtctatcagggcgatggcccactacgtgaaccatcaccctaatcaagttttttggggtcgaggtgccgtaaagcactaaatcggaaccctaaagggagcccccgatttagagcttgacggggaaagccggcgaacgtggcgagaaaggaagggaagaaagcgaaaggagcgggcgctagggcgctggcaagtgtagcggtcacgctgcgcgtaaccaccacacccgccgcgcttaatgcgccgctacagggcgcgtcaggtg

SEQ ID NO: 3201 - DNA, 5327 bp, Artificial Sequence
  Synthetic Construct, AT-44 intein modified protein encoding nucleic acids in pBluescript
gcacttttcggggaaatgtgcgcggaacccctatttgtttatttttctaaatacattcaaatatgtatccgctcatgagacaataaccctgataaatgcttcaataatattgaaaaaggaagagtatgagtattcaacatttccgtgtcgcccttattcccttttttgcggcattttgccttcctgtttttgctcacccagaaacgctggtgaaagtaaaagatgctgaagatcagttgggtgcacgagtgggttacatcgaactggatctcaacagcggtaagatccttgagagttttcgccccgaagaacgttttccaatgatgagcacttttaaagttctgctatgtggcgcggtattatcccgtattgacgccgggcaagagcaactcggtcgccgcatacactattctcagaatgacttggttgagtactcaccagtcacagaaaagcatcttacggatggcatgacagtaagagaattatgcagtgctgccataaccatgagtgataacactgcggccaacttacttctgacaacgatcggaggaccgaaggagctaaccgcttttttgcacaacatgggggatcatgtaactcgccttgatcgttgggaaccggagctgaatgaagccataccaaacgacgagcgtgacaccacgatgcctgtagcaatggcaacaacgttgcgcaaactattaactggcgaactacttactctagcttcccggcaacaattaatagactggatggaggcggataaagttgcaggaccacttctgcgctcggcccttccggctggctggtttattgctgataaatctggagccggtgagcgtgggtctcgcggtatcattgcagcactggggccagatggtaagccctcccgtatcgtagttatctacacgacggggagtcaggcaactatggatgaacgaaatagacagatcgctgagataggtgcctcactgattaagcattggtaactgtcagaccaagtttactcatatatactttagattgatttaaaacttcatttttaatttaaaaggatctaggtgaagatcctttttgataatctcatgaccaaaatcccttaacgtgagttttcgttccactgagcgtcagaccccgtagaaaagatcaaaggatcttcttgagatcctttttttctgcgcgtaatctgctgcttgcaaacaaaaaaaccaccgctaccagcggtggtttgtttgccggatcaagagctaccaactctttttccgaaggtaactggcttcagcagagcgcagataccaaatactgtccttctagtgtagccgtagttaggccaccacttcaagaactctgtagcaccgcctacatacctcgctctgctaatcctgttaccagtggctgctgccagtggcgataagtcgtgtcttaccgggttggactcaagacgatagttaccggataaggcgcagcggtcgggctgaacggggggttcgtgcacacagcccagcttggagcgaacgacctacaccgaactgagatacctacagcgtgagctatgagaaagcgccacgcttcccgaagggagaaaggcggacaggtatccggtaagcggcagggtcggaacaggagagcgcacgagggagcttccagggggaaacgcctggtatctttatagtcctgtcgggtttcgccacctctgacttgagcgtcgatttttgtgatgctcgtcaggggggcggagcctatggaaaaacgccagcaacgcggcctttttacggttcctggccttttgctggccttttgctcacatgttctttcctgcgttatcccctgattctgtggataaccgtattaccgcctttgagtgagctgataccgctcgccgcagccgaacgaccgagcgcagcgagtcagtgagcgaggaagcggaagagcgcccaatacgcaaaccgcctctccccgcgcgttggccgattcattaatgcagctggcacgacaggtttcccgactggaaagcgggcagtgagcgcaacgcaattaatgtgagttagctcactcattaggcaccccaggctttacactttatgcttccggctcgtatgttgtgtggaattgtgagcggataacaatttcacacaggaaacagcatatgcaaacaagcattactctgacatccaacgcatccggtacgtttgacggttactattacgaactctggaaggatactggcaatacaacaatgacggtctacactcaaggtcgcttttcctgccagtggtcgaacatcaataacgcgttgtttaggaccgggaagaaatacaaccagaattggcagtctcttggcacaatccggatcacgtactctgcgacttacaacccaaacgggaactcctacttgtgtatctatggctggtctaccaacccattggtcgagttctacatcgttgagtcctgggggaactggagaccgcctggtgcctgcctgcaccctgacacatacgttattctccctgacgggcgcatgaagaagatttcggagattgatgaggatgaggttctctcagtcaacttcgaggacctgaagctctacaataagaagatcaagaagttcaagcacaaggctccgaagatcctctacaagattaagaccgcgttctccgagctcatcaccacgggcgagcataagctgttcgtggtcgagaacgggaagatcgtcgagaagtgcgttaaggacctcaatggcagcgagctgatcggggttgtgaggaagctgaactactcgttcaacgacaatgtcgagttcaaggatgtctacgttgagcgccactacaagctcgacgagacaatcaggaacaagctgcgcaaggtgagggagaagctgggcctcactcggaaggatgtggagaagctctgcggggtcaaggagatctacattgttaagatcgagacaggcaagctggagtcaattgaggaggagcggctgaagaagctctgctccctgtacgggatcaacttcgaggagatcatctaccgcgacaacctccactacactaatccagtcaagttccctaagacaccgactcccgagctgatgcagatcattggctacatcattggcgacgggcatttcccctcgaatcggatgctgcgcctcaaggatgagcgcaaggaggtcctggaggagtacaaccagctgttcaagacggtgttcaacctggagggcaatatcaagaagggcgacgggaactactacatcctggagatcaacagcaagtacctgatcgattggttcagggagaacattccggagctcttcaacaagacaggcaatgagaggactcccgagttcgtgttccggctcaacaatgacctggtcgcttcttacctgcggggcatcttcgatgccgaggggtacattcgcgccgaggcgaagcagatcggcattgggatgacatcaaagtgcttcatcaaggagattcagttcctcctgctcaggttcggcatcctcgcctcctacagcaagattaagcggaaggaggagaactggaacaatacccataagctgctcatctcggacaagaagtctttcgagctgttcaagaagtacatcggcttcacggcgaaggataagatggagaagctggaggctatcctgaacaagatgaagggcctcaatttccgctacatctccattccactgaccaagaaggagatcagggagttcgtgggcgtccctctgaagacgattaagaacggggacaattactgcaccgattacacgatcgagaagatcattgaggagctcaactccaagggcctgtacgacaaggccgagtacctcaagcgcttcctggacgcggatatcgtttggacgaagttcaagattgaggaggtggagagcgatgttgagtatgtgtacgatctggaggtggaggactaccacaacttcattggcaatctcatcatcaaccacaacacgtccctgggccaagtgacaatcgatggcgggacctacgacatctataggacgacacgcgtcaaccagccttccattgtggggacagccacgttcgatcagtactggagcgtgcgcacctctaagcggacttcaggaacagtgaccgtgaccgatcacttccgcgcctgggcgaaccggggcctgaacctcggcacaatagaccaaattacattgtgcgtggagggttaccaaagctctggatcagccaacatcacccagaacaccttctctcagggctcttcttccggcagttcgggtggctcatccggctccacaacgactactcgcatcgagtgtgagaacatgtccttgtccggaccctacgttagcaggatcaccaatccctttaatggtattgcgctgtacgccaacggagacacagcccgcgctaccgttaacttccccgcaagtcgcaactacaatttccgcctgcggggttgcggcaacaacaataatcttgcccgtgtggacctgaggatcgacggacggaccgtcgggaccttttattaccagggcacatacccctgggaggccccaattgacaatgtttatgtcagtgcggggagtcatacagtcgaaatcactgttactgcggataacggcacatgggacgtgtatgccgactacctggtgatacagtgactcgagggggggcccggtacccaattcgccctatagtgagtcgtattacaattcactggccgtcgttttacaacgtcgtgactgggaaaaccctggcgttacccaacttaatcgccttgcagcacatccccctttcgccagctggcgtaatagcgaagaggcccgcaccgatcgcccttcccaacagttgcgcagcctgaatggcgaatggaaattgtaagcgttaatattttgttaaaattcgcgttaaatttttgttaaatcagctcattttttaaccaataggccgaaatcggcaaaatcccttataaatcaaaagaatagaccgagatagggttgagtgttgttccagtttggaacaagagtccactattaaagaacgtggactccaacgtcaaagggcgaaaaaccgtctatcagggcgatggcccactacgtgaaccatcaccctaatcaagttttttggggtcgaggtgccgtaaagcactaaatcggaaccctaaagggagcccccgatttagagcttgacggggaaagccggcgaacgtggcgagaaaggaagggaagaaagcgaaaggagcgggcgctagggcgctggcaagtgtagcggtcacgctgcgcgtaaccaccacacccgccgcgcttaatgcgccgctacagggcgcgtcaggtg

SEQ ID NO: 3202 - DNA, 5333 bp, Artificial Sequence
  Synthetic Construct, AT-45 intein modified protein encoding nucleic acids in pBluescript
gcacttttcggggaaatgtgcgcggaacccctatttgtttatttttctaaatacattcaaatatgtatccgctcatgagacaataaccctgataaatgcttcaataatattgaaaaaggaagagtatgagtattcaacatttccgtgtcgcccttattcccttttttgcggcattttgccttcctgtttttgctcacccagaaacgctggtgaaagtaaaagatgctgaagatcagttgggtgcacgagtgggttacatcgaactggatctcaacagcggtaagatccttgagagttttcgccccgaagaacgttttccaatgatgagcacttttaaagttctgctatgtggcgcggtattatcccgtattgacgccgggcaagagcaactcggtcgccgcatacactattctcagaatgacttggttgagtactcaccagtcacagaaaagcatcttacggatggcatgacagtaagagaattatgcagtgctgccataaccatgagtgataacactgcggccaacttacttctgacaacgatcggaggaccgaaggagctaaccgcttttttgcacaacatgggggatcatgtaactcgccttgatcgttgggaaccggagctgaatgaagccataccaaacgacgagcgtgacaccacgatgcctgtagcaatggcaacaacgttgcgcaaactattaactggcgaactacttactctagcttcccggcaacaattaatagactggatggaggcggataaagttgcaggaccacttctgcgctcggcccttccggctggctggtttattgctgataaatctggagccggtgagcgtgggtctcgcggtatcattgcagcactggggccagatggtaagccctcccgtatcgtagttatctacacgacggggagtcaggcaactatggatgaacgaaatagacagatcgctgagataggtgcctcactgattaagcattggtaactgtcagaccaagtttactcatatatactttagattgatttaaaacttcatttttaatttaaaaggatctaggtgaagatcctttttgataatctcatgaccaaaatcccttaacgtgagttttcgttccactgagcgtcagaccccgtagaaaagatcaaaggatcttcttgagatcctttttttctgcgcgtaatctgctgcttgcaaacaaaaaaaccaccgctaccagcggtggtttgtttgccggatcaagagctaccaactctttttccgaaggtaactggcttcagcagagcgcagataccaaatactgtccttctagtgtagccgtagttaggccaccacttcaagaactctgtagcaccgcctacatacctcgctctgctaatcctgttaccagtggctgctgccagtggcgataagtcgtgtcttaccgggttggactcaagacgatagttaccggataaggcgcagcggtcgggctgaacggggggttcgtgcacacagcccagcttggagcgaacgacctacaccgaactgagatacctacagcgtgagctatgagaaagcgccacgcttcccgaagggagaaaggcggacaggtatccggtaagcggcagggtcggaacaggagagcgcacgagggagcttccagggggaaacgcctggtatctttatagtcctgtcgggtttcgccacctctgacttgagcgtcgatttttgtgatgctcgtcaggggggcggagcctatggaaaaacgccagcaacgcggcctttttacggttcctggccttttgctggccttttgctcacatgttctttcctgcgttatcccctgattctgtggataaccgtattaccgcctttgagtgagctgataccgctcgccgcagccgaacgaccgagcgcagcgagtcagtgagcgaggaagcggaagagcgcccaatacgcaaaccgcctctccccgcgcgttggccgattcattaatgcagctggcacgacaggtttcccgactggaaagcgggcagtgagcgcaacgcaattaatgtgagttagctcactcattaggcaccccaggctttacactttatgcttccggctcgtatgttgtgtggaattgtgagcggataacaatttcacacaggaaacagcatatgcaaacaagcattactctgacatccaacgcatccggtacgtttgacggttactattacgaactctggaaggatactggcaatacaacaatgacggtctacactcaaggtcgcttttcctgccagtggtcgaacatcaataacgcgttgtttaggaccgggaagaaatacaaccagaattggcagtctcttggcacaatccggatcacgtactctgcgacttacaacccaaacgggaactcctacttgtgtatctatggctggtctaccaacccattggtcgagttctacatcgttgagtcctgggggaactggagaccgcctggtgcctgcctcaacgctaacactgagattctgcaggagtcggggttccgcaagattacggagctgaataaggatgagaaggttttcgcgctgtgcggcaaggagatcaagccagtcgacgggtggaaggttcacaagacgcctcagcatgagtacaacatcgtggtcaagacagtcaatggcctggagattaccacgacaccaaaccacatcttcctcgttaaggagaatggctcgctgaaggagaaggaggccaaggacctgaaggttggggattacgttgcgacggtggaccggattcgcgtgaaggagaaggacatcgatctctctaacggcgacctgtacttcattgggtacttcatcggcgatgggtacacaggcgtgatcgagaagaacacgctcaaggctacaccggatctggccttcaaccccaagtacccgcccaatttcgacgattcggagctccacaagaagtacttcctgaagtgccggatttcaaagggcgtcgctcattacatctactccaagaagctccgcaagattttcaacaagctcaatatgctgaccaaggacaacaagaatatcgatgcgttctgcaacctcccgctggacaagctcgcctacctgatcgcgggcctcttcgactccgatgggtacatctacctgaaccggaagaatattgagttctactcgatctctgagaagctcgtggagcagctgcagttcgtcctcctgcggttcggcattcactccagcatccgcaagaagaagaccaagaccatggtgtccccaactaacgggaaggagtacaagtgcaaggacatctacgtcctcaccatccgcgatttcatgagcattaagaggttctacgagaacatccctctccgccatgaggagaagcgcaggaagctggaggagatcattaagaataaggagatcggccagattccgtctgagttcgttgcgctgaggttcacccccatcgctaagatttggtgcgactgcggcttctcagtggatctcactatgttcaagccgcgcaccaagaggcagcgggagctgaacaagaagagggtgaagctcctgttcgagctcctggacggcaagaagctcatcacgaactacaaggagtactacagcaagaggaagaatccctacttcgatttcattgtccgggagaagatcaacggcaacaattactacagcctcaatgagaaggggagggttctgatgtcgctcctgaacaagcacatcaaggacaaggagaatctggaggagatgtacaacttcctcgtgaatctggagaagtgcccaatttgcggcaagcctatccataaggagatgaggtactcctggaagaaggagtgctacgacggggatatctactgggaccggatcaaggagattaagaagatcaaggtcaacgacaagtacgcctacgatatcgagctgccagatgacgggtctaattcacactacatcgttgctaacggcttcatcgtgcataacacgtccctgggccaagtgacaatcgatggcgggacctacgacatctataggacgacacgcgtcaaccagccttccattgtggggacagccacgttcgatcagtactggagcgtgcgcacctctaagcggacttcaggaacagtgaccgtgaccgatcacttccgcgcctgggcgaaccggggcctgaacctcggcacaatagaccaaattacattgtgcgtggagggttaccaaagctctggatcagccaacatcacccagaacaccttctctcagggctcttcttccggcagttcgggtggctcatccggctccacaacgactactcgcatcgagtgtgagaacatgtccttgtccggaccctacgttagcaggatcaccaatccctttaatggtattgcgctgtacgccaacggagacacagcccgcgctaccgttaacttccccgcaagtcgcaactacaatttccgcctgcggggttgcggcaacaacaataatcttgcccgtgtggacctgaggatcgacggacggaccgtcgggaccttttattaccagggcacatacccctgggaggccccaattgacaatgtttatgtcagtgcggggagtcatacagtcgaaatcactgttactgcggataacggcacatgggacgtgtatgccgactacctggtgatacagtgactcgagggggggcccggtacccaattcgccctatagtgagtcgtattacaattcactggccgtcgttttacaacgtcgtgactgggaaaaccctggcgttacccaacttaatcgccttgcagcacatccccctttcgccagctggcgtaatagcgaagaggcccgcaccgatcgcccttcccaacagttgcgcagcctgaatggcgaatggaaattgtaagcgttaatattttgttaaaattcgcgttaaatttttgttaaatcagctcattttttaaccaataggccgaaatcggcaaaatcccttataaatcaaaagaatagaccgagatagggttgagtgttgttccagtttggaacaagagtccactattaaagaacgtggactccaacgtcaaagggcgaaaaaccgtctatcagggcgatggcccactacgtgaaccatcaccctaatcaagttttttggggtcgaggtgccgtaaagcactaaatcggaaccctaaagggagcccccgatttagagcttgacggggaaagccggcgaacgtggcgagaaaggaagggaagaaagcgaaaggagcgggcgctagggcgctggcaagtgtagcggtcacgctgcgcgtaaccaccacacccgccgcgcttaatgcgccgctacagggcgcgtcaggtg

SEQ ID NO: 3203 - DNA, 5006 bp, Artificial Sequence
  Synthetic Construct, AT-46 intein modified protein encoding nucleic acids in pBluescript
gcacttttcggggaaatgtgcgcggaacccctatttgtttatttttctaaatacattcaaatatgtatccgctcatgagacaataaccctgataaatgcttcaataatattgaaaaaggaagagtatgagtattcaacatttccgtgtcgcccttattcccttttttgcggcattttgccttcctgtttttgctcacccagaaacgctggtgaaagtaaaagatgctgaagatcagttgggtgcacgagtgggttacatcgaactggatctcaacagcggtaagatccttgagagttttcgccccgaagaacgttttccaatgatgagcacttttaaagttctgctatgtggcgcggtattatcccgtattgacgccgggcaagagcaactcggtcgccgcatacactattctcagaatgacttggttgagtactcaccagtcacagaaaagcatcttacggatggcatgacagtaagagaattatgcagtgctgccataaccatgagtgataacactgcggccaacttacttctgacaacgatcggaggaccgaaggagctaaccgcttttttgcacaacatgggggatcatgtaactcgccttgatcgttgggaaccggagctgaatgaagccataccaaacgacgagcgtgacaccacgatgcctgtagcaatggcaacaacgttgcgcaaactattaactggcgaactacttactctagcttcccggcaacaattaatagactggatggaggcggataaagttgcaggaccacttctgcgctcggcccttccggctggctggtttattgctgataaatctggagccggtgagcgtgggtctcgcggtatcattgcagcactggggccagatggtaagccctcccgtatcgtagttatctacacgacggggagtcaggcaactatggatgaacgaaatagacagatcgctgagataggtgcctcactgattaagcattggtaactgtcagaccaagtttactcatatatactttagattgatttaaaacttcatttttaatttaaaaggatctaggtgaagatcctttttgataatctcatgaccaaaatcccttaacgtgagttttcgttccactgagcgtcagaccccgtagaaaagatcaaaggatcttcttgagatcctttttttctgcgcgtaatctgctgcttgcaaacaaaaaaaccaccgctaccagcggtggtttgtttgccggatcaagagctaccaactctttttccgaaggtaactggcttcagcagagcgcagataccaaatactgtccttctagtgtagccgtagttaggccaccacttcaagaactctgtagcaccgcctacatacctcgctctgctaatcctgttaccagtggctgctgccagtggcgataagtcgtgtcttaccgggttggactcaagacgatagttaccggataaggcgcagcggtcgggctgaacggggggttcgtgcacacagcccagcttggagcgaacgacctacaccgaactgagatacctacagcgtgagctatgagaaagcgccacgcttcccgaagggagaaaggcggacaggtatccggtaagcggcagggtcggaacaggagagcgcacgagggagcttccagggggaaacgcctggtatctttatagtcctgtcgggtttcgccacctctgacttgagcgtcgatttttgtgatgctcgtcaggggggcggagcctatggaaaaacgccagcaacgcggcctttttacggttcctggccttttgctggccttttgctcacatgttctttcctgcgttatcccctgattctgtggataaccgtattaccgcctttgagtgagctgataccgctcgccgcagccgaacgaccgagcgcagcgagtcagtgagcgaggaagcggaagagcgcccaatacgcaaaccgcctctccccgcgcgttggccgattcattaatgcagctggcacgacaggtttcccgactggaaagcgggcagtgagcgcaacgcaattaatgtgagttagctcactcattaggcaccccaggctttacactttatgcttccggctcgtatgttgtgtggaattgtgagcggataacaatttcacacaggaaacagcatatgcaaacaagcattactctgacatccaacgcatccggtacgtttgacggttactattacgaactctggaaggatactggcaatacaacaatgacggtctacactcaaggtcgcttttcctgccagtggtcgaacatcaataacgcgttgtttaggaccgggaagaaatacaaccagaattggcagtctcttggcacaatccggatcacgtactctgcgacttacaacccaaacgggaactcctacttgtgtatctatggctggtctaccaacccattggtcgagttctacatcgttgagtcctgggggaactggagaccgcctggtgcctgcgttccgcctgacactctgctcatcctggagaatgggttcaagcgcatcgtggacattaaggtcggggacaaggtcctgacgcacgagaaccggttcaagaaggttgagaaggtgtacaagcgcaggtacatcggcgacatcattaagattaaggtgcgctacttcccagaggagatcattctcaccccagagcaccctgtctacgctatcaagacggagaagaggtgcgatggctctcatgggatctgcaagttcaactgcctcacacagtacactaatccttcatgcaagaagcggtaccgcaagtacaagagggagtggatcattgccaaggacctgaaggtcggcgatgtgatcgtctacccgattcccaacagggttcgggacatcaagtacctctccctggataagtacctcagcaatatcaagagggagttctgccgctcccgcatcccggagaagattgaggtctctgaggagttctgccgcctcgttggctacttcctgtccgaggggtactgcttcagggacggcatcgggttcgctctgggcgagaacgagaagaagatcattgacgatatcgagtacctcatgaagaagattttcaatctgaagcccaagatccgcgacgatggccgctcagaggggatcgagctcaagtactactcccgggtgctgcgcgacttcttcggcgatatgttctactgcggggacgagaagcgggcctggaacaaggcgctcccaaatgagttcctctacctgcctaagaacaagcagctgcagatcttcattggctggtggaggggcgataagggggtcaccacgtcggagattctgatgaaccagctcaggctgatcagcctccggctgggcttcatcattaccttctcgaagcacgttccgaagaatcccaagatcggcgacagggaggtcatcaagtaccatgctaggtggcagggccgcgtgtccatcctcgacgagaagattgtcgatgagctcaagaacgaggacatcaagctgccgaagaaggatgttcgctacggctggatcaaggggaattacctgtacgctcccatcattaggatcggccgggagtactacgacgggttcgtctacaatctggaggtggaggatgactcttcatacgttacagtctcaggcactctgcacaacacgtccctgggccaagtgacaatcgatggcgggacctacgacatctataggacgacacgcgtcaaccagccttccattgtggggacagccacgttcgatcagtactggagcgtgcgcacctctaagcggacttcaggaacagtgaccgtgaccgatcacttccgcgcctgggcgaaccggggcctgaacctcggcacaatagaccaaattacattgtgcgtggagggttaccaaagctctggatcagccaacatcacccagaacaccttctctcagggctcttcttccggcagttcgggtggctcatccggctccacaacgactactcgcatcgagtgtgagaacatgtccttgtccggaccctacgttagcaggatcaccaatccctttaatggtattgcgctgtacgccaacggagacacagcccgcgctaccgttaacttccccgcaagtcgcaactacaatttccgcctgcggggttgcggcaacaacaataatcttgcccgtgtggacctgaggatcgacggacggaccgtcgggaccttttattaccagggcacatacccctgggaggccccaattgacaatgtttatgtcagtgcggggagtcatacagtcgaaatcactgttactgcggataacggcacatgggacgtgtatgccgactacctggtgatacagtgactcgagggggggcccggtacccaattcgccctatagtgagtcgtattacaattcactggccgtcgttttacaacgtcgtgactgggaaaaccctggcgttacccaacttaatcgccttgcagcacatccccctttcgccagctggcgtaatagcgaagaggcccgcaccgatcgcccttcccaacagttgcgcagcctgaatggcgaatggaaattgtaagcgttaatattttgttaaaattcgcgttaaatttttgttaaatcagctcattttttaaccaataggccgaaatcggcaaaatcccttataaatcaaaagaatagaccgagatagggttgagtgttgttccagtttggaacaagagtccactattaaagaacgtggactccaacgtcaaagggcgaaaaaccgtctatcagggcgatggcccactacgtgaaccatcaccctaatcaagttttttggggtcgaggtgccgtaaagcactaaatcggaaccctaaagggagcccccgatttagagcttgacggggaaagccggcgaacgtggcgagaaaggaagggaagaaagcgaaaggagcgggcgctagggcgctggcaagtgtagcggtcacgctgcgcgtaaccaccacacccgccgcgcttaatgcgccgctacagggcgcgtcaggtg

SEQ ID NO: 3204 - DNA, 5468 bp, Artificial Sequence
  Synthetic Construct, AT-47 intein modified protein encoding nucleic acids in pBluescript
gcacttttcggggaaatgtgcgcggaacccctatttgtttatttttctaaatacattcaaatatgtatccgctcatgagacaataaccctgataaatgcttcaataatattgaaaaaggaagagtatgagtattcaacatttccgtgtcgcccttattcccttttttgcggcattttgccttcctgtttttgctcacccagaaacgctggtgaaagtaaaagatgctgaagatcagttgggtgcacgagtgggttacatcgaactggatctcaacagcggtaagatccttgagagttttcgccccgaagaacgttttccaatgatgagcacttttaaagttctgctatgtggcgcggtattatcccgtattgacgccgggcaagagcaactcggtcgccgcatacactattctcagaatgacttggttgagtactcaccagtcacagaaaagcatcttacggatggcatgacagtaagagaattatgcagtgctgccataaccatgagtgataacactgcggccaacttacttctgacaacgatcggaggaccgaaggagctaaccgcttttttgcacaacatgggggatcatgtaactcgccttgatcgttgggaaccggagctgaatgaagccataccaaacgacgagcgtgacaccacgatgcctgtagcaatggcaacaacgttgcgcaaactattaactggcgaactacttactctagcttcccggcaacaattaatagactggatggaggcggataaagttgcaggaccacttctgcgctcggcccttccggctggctggtttattgctgataaatctggagccggtgagcgtgggtctcgcggtatcattgcagcactggggccagatggtaagccctcccgtatcgtagttatctacacgacggggagtcaggcaactatggatgaacgaaatagacagatcgctgagataggtgcctcactgattaagcattggtaactgtcagaccaagtttactcatatatactttagattgatttaaaacttcatttttaatttaaaaggatctaggtgaagatcctttttgataatctcatgaccaaaatcccttaacgtgagttttcgttccactgagcgtcagaccccgtagaaaagatcaaaggatcttcttgagatcctttttttctgcgcgtaatctgctgcttgcaaacaaaaaaaccaccgctaccagcggtggtttgtttgccggatcaagagctaccaactctttttccgaaggtaactggcttcagcagagcgcagataccaaatactgtccttctagtgtagccgtagttaggccaccacttcaagaactctgtagcaccgcctacatacctcgctctgctaatcctgttaccagtggctgctgccagtggcgataagtcgtgtcttaccgggttggactcaagacgatagttaccggataaggcgcagcggtcgggctgaacggggggttcgtgcacacagcccagcttggagcgaacgacctacaccgaactgagatacctacagcgtgagctatgagaaagcgccacgcttcccgaagggagaaaggcggacaggtatccggtaagcggcagggtcggaacaggagagcgcacgagggagcttccagggggaaacgcctggtatctttatagtcctgtcgggtttcgccacctctgacttgagcgtcgatttttgtgatgctcgtcaggggggcggagcctatggaaaaacgccagcaacgcggcctttttacggttcctggccttttgctggccttttgctcacatgttctttcctgcgttatcccctgattctgtggataaccgtattaccgcctttgagtgagctgataccgctcgccgcagccgaacgaccgagcgcagcgagtcagtgagcgaggaagcggaagagcgcccaatacgcaaaccgcctctccccgcgcgttggccgattcattaatgcagctggcacgacaggtttcccgactggaaagcgggcagtgagcgcaacgcaattaatgtgagttagctcactcattaggcaccccaggctttacactttatgcttccggctcgtatgttgtgtggaattgtgagcggataacaatttcacacaggaaacagcatatgcaaacaagcattactctgacatccaacgcatccggtacgtttgacggttactattacgaactctggaaggatactggcaatacaacaatgacggtctacactcaaggtcgcttttcctgccagtggtcgaacatcaataacgcgttgtttaggaccgggaagaaatacaaccagaattggcagtctcttggcacaatccggatcacgtactctgcgacttacaacccaaacgggaactcctacttgtgtatctatggctggtctaccaacccattggtcgagttctacatcgttgagtcctgggggaactggagaccgcctggtgcctgcctgatgccgcatgagaaggtgctgacggagtacggggagattaagattgaggacctgttcaagatcgggaaggagatcgtggagaaggacgagctcaaggagatcaggaagctgaatattaaggtgcacactctcaacgagaatggcgagatcaagatcattaacgccccatacgtgtggaagctcaagcataaggggaagatgatcaaggtcaagctgaagaactggcactcgatcaccacgacaccggagcatcccttcctgaccaacaatggctggatcaaggcggagaatattaagaaggggatgtatgtggctatccctcgcaagatctacggcaacgaggacttcgagaagttcatcgagttcattaattccaagatcctcacgaacgagctgattgtgaaggtcaatgagaaggacctcaagaacgttgagctgccgtcaacaaagatctacaagaagcagaagaacgtgttccgctccgaggatatcattgagcacaacctcaatatcgagaagatttcgttctctccacggatccaccgctgcggcaagccacagcattacatcaagctccctaagtctctgaacgagtggaaggccatcttctacttcgctggcgtgatgttcggcgacgggtgcgtcgatcggatcgcgaacaatgacgaggaggtcttcaacaagctgaagtcactcaacaatctgggcatcgaggttgagaggattaagcggaagtccagctacgagatcattttcaagaacgggaagaatgctctcatcaacctcctgaagattctgttcgattacccgtctgagaagaagtcacataacatcaagattccgcagatcctctacattgctcccaaggagctggtggccgagttcatcaagggctacttcgacgccgatggctacgtgaatctccgccagaacaggatcgaggttatttcagcgtccaaggagttcatcgagggcctgtccattctcctgctccgcttcgagatcacttccaagatctacgagattaagaagagctacaaggagaccaagaagaagtactaccagctcaacatcgtcggcaagaggaacctgaagaatttcaagaacatcgggttctccattaagtacaaggaggagaacctgaataagatcattgagaagagcaggaagtcggagaagtaccccatcaacaaggacatgaagcgcctcaggattctgttcggcatgacgcggaatgaggttaacgtgagctactacgccaagtacgagaacgggaaggagatcccatcgtacgagattgtgaagaagttcctcaattctctgaagcctaagaacctcgataagaagatcaaggttctggagggcaaggagcgcgacgtgaattacctcaaggctttcgagagcgatggcctgatcgagaacgggaggctcaccaagctgggcagggaggccctcaatatctggaagaaccacgagttcgggaaggagaatatcgactacatgaagtcgctgatcgagaacattgcgttcgtcgaggttgaggatgtcgagatcattgactacgatggctacgtttacgatctcacaacagagactcataacttcattgctaatggcatcgtggttcataatacgtccctgggccaagtgacaatcgatggcgggacctacgacatctataggacgacacgcgtcaaccagccttccattgtggggacagccacgttcgatcagtactggagcgtgcgcacctctaagcggacttcaggaacagtgaccgtgaccgatcacttccgcgcctgggcgaaccggggcctgaacctcggcacaatagaccaaattacattgtgcgtggagggttaccaaagctctggatcagccaacatcacccagaacaccttctctcagggctcttcttccggcagttcgggtggctcatccggctccacaacgactactcgcatcgagtgtgagaacatgtccttgtccggaccctacgttagcaggatcaccaatccctttaatggtattgcgctgtacgccaacggagacacagcccgcgctaccgttaacttccccgcaagtcgcaactacaatttccgcctgcggggttgcggcaacaacaataatcttgcccgtgtggacctgaggatcgacggacggaccgtcgggaccttttattaccagggcacatacccctgggaggccccaattgacaatgtttatgtcagtgcggggagtcatacagtcgaaatcactgttactgcggataacggcacatgggacgtgtatgccgactacctggtgatacagtgactcgagggggggcccggtacccaattcgccctatagtgagtcgtattacaattcactggccgtcgttttacaacgtcgtgactgggaaaaccctggcgttacccaacttaatcgccttgcagcacatccccctttcgccagctggcgtaatagcgaagaggcccgcaccgatcgcccttcccaacagttgcgcagcctgaatggcgaatggaaattgtaagcgttaatattttgttaaaattcgcgttaaatttttgttaaatcagctcattttttaaccaataggccgaaatcggcaaaatcccttataaatcaaaagaatagaccgagatagggttgagtgttgttccagtttggaacaagagtccactattaaagaacgtggactccaacgtcaaagggcgaaaaaccgtctatcagggcgatggcccactacgtgaaccatcaccctaatcaagttttttggggtcgaggtgccgtaaagcactaaatcggaaccctaaagggagcccccgatttagagcttgacggggaaagccggcgaacgtggcgagaaaggaagggaagaaagcgaaaggagcgggcgctagggcgctggcaagtgtagcggtcacgctgcgcgtaaccaccacacccgccgcgcttaatgcgccgctacagggcgcgtcaggtg

SEQ ID NO: 3205 - DNA, 4334 bp, Artificial Sequence
  Synthetic Construct, AT-48 intein modified protein encoding nucleic acids in pBluescript
gcacttttcggggaaatgtgcgcggaacccctatttgtttatttttctaaatacattcaaatatgtatccgctcatgagacaataaccctgataaatgcttcaataatattgaaaaaggaagagtatgagtattcaacatttccgtgtcgcccttattcccttttttgcggcattttgccttcctgtttttgctcacccagaaacgctggtgaaagtaaaagatgctgaagatcagttgggtgcacgagtgggttacatcgaactggatctcaacagcggtaagatccttgagagttttcgccccgaagaacgttttccaatgatgagcacttttaaagttctgctatgtggcgcggtattatcccgtattgacgccgggcaagagcaactcggtcgccgcatacactattctcagaatgacttggttgagtactcaccagtcacagaaaagcatcttacggatggcatgacagtaagagaattatgcagtgctgccataaccatgagtgataacactgcggccaacttacttctgacaacgatcggaggaccgaaggagctaaccgcttttttgcacaacatgggggatcatgtaactcgccttgatcgttgggaaccggagctgaatgaagccataccaaacgacgagcgtgacaccacgatgcctgtagcaatggcaacaacgttgcgcaaactattaactggcgaactacttactctagcttcccggcaacaattaatagactggatggaggcggataaagttgcaggaccacttctgcgctcggcccttccggctggctggtttattgctgataaatctggagccggtgagcgtgggtctcgcggtatcattgcagcactggggccagatggtaagccctcccgtatcgtagttatctacacgacggggagtcaggcaactatggatgaacgaaatagacagatcgctgagataggtgcctcactgattaagcattggtaactgtcagaccaagtttactcatatatactttagattgatttaaaacttcatttttaatttaaaaggatctaggtgaagatcctttttgataatctcatgaccaaaatcccttaacgtgagttttcgttccactgagcgtcagaccccgtagaaaagatcaaaggatcttcttgagatcctttttttctgcgcgtaatctgctgcttgcaaacaaaaaaaccaccgctaccagcggtggtttgtttgccggatcaagagctaccaactctttttccgaaggtaactggcttcagcagagcgcagataccaaatactgtccttctagtgtagccgtagttaggccaccacttcaagaactctgtagcaccgcctacatacctcgctctgctaatcctgttaccagtggctgctgccagtggcgataagtcgtgtcttaccgggttggactcaagacgatagttaccggataaggcgcagcggtcgggctgaacggggggttcgtgcacacagcccagcttggagcgaacgacctacaccgaactgagatacctacagcgtgagctatgagaaagcgccacgcttcccgaagggagaaaggcggacaggtatccggtaagcggcagggtcggaacaggagagcgcacgagggagcttccagggggaaacgcctggtatctttatagtcctgtcgggtttcgccacctctgacttgagcgtcgatttttgtgatgctcgtcaggggggcggagcctatggaaaaacgccagcaacgcggcctttttacggttcctggccttttgctggccttttgctcacatgttctttcctgcgttatcccctgattctgtggataaccgtattaccgcctttgagtgagctgataccgctcgccgcagccgaacgaccgagcgcagcgagtcagtgagcgaggaagcggaagagcgcccaatacgcaaaccgcctctccccgcgcgttggccgattcattaatgcagctggcacgacaggtttcccgactggaaagcgggcagtgagcgcaacgcaattaatgtgagttagctcactcattaggcaccccaggctttacactttatgcttccggctcgtatgttgtgtggaattgtgagcggataacaatttcacacaggaaacagcatatgcaaacaagcattactctgacatccaacgcatccggtacgtttgacggttactattacgaactctggaaggatactggcaatacaacaatgacggtctacactcaaggtcgcttttcctgccagtggtcgaacatcaataacgcgttgtttaggaccgggaagaaatacaaccagaattggcagtctcttggcacaatccggatcacgtactctgcgacttacaacccaaacgggaactcctacttgtgtatctatggctggtctaccaacccattggtcgagttctacatcgttgagtcctgggggaactggagaccgcctggtgccgctctcgcctacgatgagcctatctacctctcggatggcaacattatcaatatcggggagttcgtggataagttcttcaagaagtacaagaacagcatcaagaaggaggacaatggcttcgggtggatcgatattggcaacgagaatatctacattaagtccttcaacaagctcagcctgatcattgaggacaagcggatcctccgcgtctggcgcaagaagtactcggggaagctgatcaagattaccacgaagaaccgcagggagatcacactcactcacgatcatccggtttacatctctaagaccggcgaggtgctggagattaatgccgagatggtgaaggtcggggactacatctacattcccaagaacaataccatcaacctcgatgaggttattaaggtggagacggtcgactacaatggccacatctacgatctgactgtggaggataatcatacttacattgctggcaagaatgagggcttcgctgtttccaacacgtccctgggccaagtgacaatcgatggcgggacctacgacatctataggacgacacgcgtcaaccagccttccattgtggggacagccacgttcgatcagtactggagcgtgcgcacctctaagcggacttcaggaacagtgaccgtgaccgatcacttccgcgcctgggcgaaccggggcctgaacctcggcacaatagaccaaattacattgtgcgtggagggttaccaaagctctggatcagccaacatcacccagaacaccttctctcagggctcttcttccggcagttcgggtggctcatccggctccacaacgactactcgcatcgagtgtgagaacatgtccttgtccggaccctacgttagcaggatcaccaatccctttaatggtattgcgctgtacgccaacggagacacagcccgcgctaccgttaacttccccgcaagtcgcaactacaatttccgcctgcggggttgcggcaacaacaataatcttgcccgtgtggacctgaggatcgacggacggaccgtcgggaccttttattaccagggcacatacccctgggaggccccaattgacaatgtttatgtcagtgcggggagtcatacagtcgaaatcactgttactgcggataacggcacatgggacgtgtatgccgactacctggtgatacagtgactcgagggggggcccggtacccaattcgccctatagtgagtcgtattacaattcactggccgtcgttttacaacgtcgtgactgggaaaaccctggcgttacccaacttaatcgccttgcagcacatccccctttcgccagctggcgtaatagcgaagaggcccgcaccgatcgcccttcccaacagttgcgcagcctgaatggcgaatggaaattgtaagcgttaatattttgttaaaattcgcgttaaatttttgttaaatcagctcattttttaaccaataggccgaaatcggcaaaatcccttataaatcaaaagaatagaccgagatagggttgagtgttgttccagtttggaacaagagtccactattaaagaacgtggactccaacgtcaaagggcgaaaaaccgtctatcagggcgatggcccactacgtgaaccatcaccctaatcaagttttttggggtcgaggtgccgtaaagcactaaatcggaaccctaaagggagcccccgatttagagcttgacggggaaagccggcgaacgtggcgagaaaggaagggaagaaagcgaaaggagcgggcgctagggcgctggcaagtgtagcggtcacgctgcgcgtaaccaccacacccgccgcgcttaatgcgccgctacagggcgcgtcaggtg

SEQ ID NO: 3206 - DNA, 5066 bp, Artificial Sequence
  Synthetic Construct, AT-49 intein modified protein encoding nucleic acids in pBluescript
gcacttttcggggaaatgtgcgcggaacccctatttgtttatttttctaaatacattcaaatatgtatccgctcatgagacaataaccctgataaatgcttcaataatattgaaaaaggaagagtatgagtattcaacatttccgtgtcgcccttattcccttttttgcggcattttgccttcctgtttttgctcacccagaaacgctggtgaaagtaaaagatgctgaagatcagttgggtgcacgagtgggttacatcgaactggatctcaacagcggtaagatccttgagagttttcgccccgaagaacgttttccaatgatgagcacttttaaagttctgctatgtggcgcggtattatcccgtattgacgccgggcaagagcaactcggtcgccgcatacactattctcagaatgacttggttgagtactcaccagtcacagaaaagcatcttacggatggcatgacagtaagagaattatgcagtgctgccataaccatgagtgataacactgcggccaacttacttctgacaacgatcggaggaccgaaggagctaaccgcttttttgcacaacatgggggatcatgtaactcgccttgatcgttgggaaccggagctgaatgaagccataccaaacgacgagcgtgacaccacgatgcctgtagcaatggcaacaacgttgcgcaaactattaactggcgaactacttactctagcttcccggcaacaattaatagactggatggaggcggataaagttgcaggaccacttctgcgctcggcccttccggctggctggtttattgctgataaatctggagccggtgagcgtgggtctcgcggtatcattgcagcactggggccagatggtaagccctcccgtatcgtagttatctacacgacggggagtcaggcaactatggatgaacgaaatagacagatcgctgagataggtgcctcactgattaagcattggtaactgtcagaccaagtttactcatatatactttagattgatttaaaacttcatttttaatttaaaaggatctaggtgaagatcctttttgataatctcatgaccaaaatcccttaacgtgagttttcgttccactgagcgtcagaccccgtagaaaagatcaaaggatcttcttgagatcctttttttctgcgcgtaatctgctgcttgcaaacaaaaaaaccaccgctaccagcggtggtttgtttgccggatcaagagctaccaactctttttccgaaggtaactggcttcagcagagcgcagataccaaatactgtccttctagtgtagccgtagttaggccaccacttcaagaactctgtagcaccgcctacatacctcgctctgctaatcctgttaccagtggctgctgccagtggcgataagtcgtgtcttaccgggttggactcaagacgatagttaccggataaggcgcagcggtcgggctgaacggggggttcgtgcacacagcccagcttggagcgaacgacctacaccgaactgagatacctacagcgtgagctatgagaaagcgccacgcttcccgaagggagaaaggcggacaggtatccggtaagcggcagggtcggaacaggagagcgcacgagggagcttccagggggaaacgcctggtatctttatagtcctgtcgggtttcgccacctctgacttgagcgtcgatttttgtgatgctcgtcaggggggcggagcctatggaaaaacgccagcaacgcggcctttttacggttcctggccttttgctggccttttgctcacatgttctttcctgcgttatcccctgattctgtggataaccgtattaccgcctttgagtgagctgataccgctcgccgcagccgaacgaccgagcgcagcgagtcagtgagcgaggaagcggaagagcgcccaatacgcaaaccgcctctccccgcgcgttggccgattcattaatgcagctggcacgacaggtttcccgactggaaagcgggcagtgagcgcaacgcaattaatgtgagttagctcactcattaggcaccccaggctttacactttatgcttccggctcgtatgttgtgtggaattgtgagcggataacaatttcacacaggaaacagcatatgcaaacaagcattactctgacatccaacgcatccggtacgtttgacggttactattacgaactctggaaggatactggcaatacaacaatgacggtctacactcaaggtcgcttttcctgccagtggtcgaacatcaataacgcgttgtttaggaccgggaagaaatacaaccagaattggcagtctcttggcacaatccggatcacgtactctgcgacttacaacccaaacgggaactcctacttgtgtatctatggctggtctaccaacccattggtcgagttctacatcgttgagtcctgggggaactggagaccgcctggtgcctgcattgagggggacgctaagattctgacggatcgggggttcctgaagatgaaggaggtttacaagctcgtgaagaatggggagaagctcaaggtcctcggcctgaatgctgagacactgaagactgagtggaaggagatcattgacgctcagaagagggaggctaggcgctacgagatcggcgtgtaccgcaagaataagaacaccaaggacacgatcaagattacaccggatcacaagttccccgtgttcgtcaacggcgagctcagcaaggtgcagctgtgcgacatcattgataacaatctctcagtcctgtccatcgactacattccaatgatcgaggagaagtacgagtccctcgctgaggtcatgtacctcggcggggctgtcctgagcgatggccatatcgttcggaggaacgggaagccaattcgggtccgcttcacacagaaggacactgaggagaagaaggatttcatcgagaaggttaagggcgacgtgaagctcatcggcgggaatttcatcgagatttcgaaccgcaacaatgtcatcgagtaccagacctctaggaagattccgtcagagatcctgggcttcattgaggttaatattaacacaatccccctctacgccactaaggacgagatcgccgatctgattgcgggcttcgttgacggcgatgggtgcctctccgggaagaggagggtggagatctaccagaactccagccacattaagaagatcgagggcctcatcgtcgggctctacaggctgggcatcattccgaggctgcggtacaagcggtcgtctaccgcgacgatctacttcaacaacaacctggagaccatcctgcagcgcacgcgcaggattaagctcgacaagctgaaggagttcaagaagccagtggaggacaagaagctgatcgatatttcgcagatcctccctgagctgaaggagttcgactacaagggctacctctacaagacctacaaggagaagctgttcatcgggattaacaagctggaggagtacctgtctaagatcgacaaggatggcattgagcgcatcaagcagaagatcaagctcctgaaggagagcgacatctactcgatcaggattaagaaggtcggcgaggattacggggaggtctacaatatcacggttaaggcggagaacgagttcaatcataactacgtggtttggactaagcattacacacctatcgtggttttcaacacgtccctgggccaagtgacaatcgatggcgggacctacgacatctataggacgacacgcgtcaaccagccttccattgtggggacagccacgttcgatcagtactggagcgtgcgcacctctaagcggacttcaggaacagtgaccgtgaccgatcacttccgcgcctgggcgaaccggggcctgaacctcggcacaatagaccaaattacattgtgcgtggagggttaccaaagctctggatcagccaacatcacccagaacaccttctctcagggctcttcttccggcagttcgggtggctcatccggctccacaacgactactcgcatcgagtgtgagaacatgtccttgtccggaccctacgttagcaggatcaccaatccctttaatggtattgcgctgtacgccaacggagacacagcccgcgctaccgttaacttccccgcaagtcgcaactacaatttccgcctgcggggttgcggcaacaacaataatcttgcccgtgtggacctgaggatcgacggacggaccgtcgggaccttttattaccagggcacatacccctgggaggccccaattgacaatgtttatgtcagtgcggggagtcatacagtcgaaatcactgttactgcggataacggcacatgggacgtgtatgccgactacctggtgatacagtgactcgagggggggcccggtacccaattcgccctatagtgagtcgtattacaattcactggccgtcgttttacaacgtcgtgactgggaaaaccctggcgttacccaacttaatcgccttgcagcacatccccctttcgccagctggcgtaatagcgaagaggcccgcaccgatcgcccttcccaacagttgcgcagcctgaatggcgaatggaaattgtaagcgttaatattttgttaaaattcgcgttaaatttttgttaaatcagctcattttttaaccaataggccgaaatcggcaaaatcccttataaatcaaaagaatagaccgagatagggttgagtgttgttccagtttggaacaagagtccactattaaagaacgtggactccaacgtcaaagggcgaaaaaccgtctatcagggcgatggcccactacgtgaaccatcaccctaatcaagttttttggggtcgaggtgccgtaaagcactaaatcggaaccctaaagggagcccccgatttagagcttgacggggaaagccggcgaacgtggcgagaaaggaagggaagaaagcgaaaggagcgggcgctagggcgctggcaagtgtagcggtcacgctgcgcgtaaccaccacacccgccgcgcttaatgcgccgctacagggcgcgtcaggtg

SEQ ID NO: 3207 - DNA, 4937 bp, Artificial Sequence
  Synthetic Construct, AT-50 intein modified protein encoding nucleic acids in pBluescript
gcacttttcggggaaatgtgcgcggaacccctatttgtttatttttctaaatacattcaaatatgtatccgctcatgagacaataaccctgataaatgcttcaataatattgaaaaaggaagagtatgagtattcaacatttccgtgtcgcccttattcccttttttgcggcattttgccttcctgtttttgctcacccagaaacgctggtgaaagtaaaagatgctgaagatcagttgggtgcacgagtgggttacatcgaactggatctcaacagcggtaagatccttgagagttttcgccccgaagaacgttttccaatgatgagcacttttaaagttctgctatgtggcgcggtattatcccgtattgacgccgggcaagagcaactcggtcgccgcatacactattctcagaatgacttggttgagtactcaccagtcacagaaaagcatcttacggatggcatgacagtaagagaattatgcagtgctgccataaccatgagtgataacactgcggccaacttacttctgacaacgatcggaggaccgaaggagctaaccgcttttttgcacaacatgggggatcatgtaactcgccttgatcgttgggaaccggagctgaatgaagccataccaaacgacgagcgtgacaccacgatgcctgtagcaatggcaacaacgttgcgcaaactattaactggcgaactacttactctagcttcccggcaacaattaatagactggatggaggcggataaagttgcaggaccacttctgcgctcggcccttccggctggctggtttattgctgataaatctggagccggtgagcgtgggtctcgcggtatcattgcagcactggggccagatggtaagccctcccgtatcgtagttatctacacgacggggagtcaggcaactatggatgaacgaaatagacagatcgctgagataggtgcctcactgattaagcattggtaactgtcagaccaagtttactcatatatactttagattgatttaaaacttcatttttaatttaaaaggatctaggtgaagatcctttttgataatctcatgaccaaaatcccttaacgtgagttttcgttccactgagcgtcagaccccgtagaaaagatcaaaggatcttcttgagatcctttttttctgcgcgtaatctgctgcttgcaaacaaaaaaaccaccgctaccagcggtggtttgtttgccggatcaagagctaccaactctttttccgaaggtaactggcttcagcagagcgcagataccaaatactgtccttctagtgtagccgtagttaggccaccacttcaagaactctgtagcaccgcctacatacctcgctctgctaatcctgttaccagtggctgctgccagtggcgataagtcgtgtcttaccgggttggactcaagacgatagttaccggataaggcgcagcggtcgggctgaacggggggttcgtgcacacagcccagcttggagcgaacgacctacaccgaactgagatacctacagcgtgagctatgagaaagcgccacgcttcccgaagggagaaaggcggacaggtatccggtaagcggcagggtcggaacaggagagcgcacgagggagcttccagggggaaacgcctggtatctttatagtcctgtcgggtttcgccacctctgacttgagcgtcgatttttgtgatgctcgtcaggggggcggagcctatggaaaaacgccagcaacgcggcctttttacggttcctggccttttgctggccttttgctcacatgttctttcctgcgttatcccctgattctgtggataaccgtattaccgcctttgagtgagctgataccgctcgccgcagccgaacgaccgagcgcagcgagtcagtgagcgaggaagcggaagagcgcccaatacgcaaaccgcctctccccgcgcgttggccgattcattaatgcagctggcacgacaggtttcccgactggaaagcgggcagtgagcgcaacgcaattaatgtgagttagctcactcattaggcaccccaggctttacactttatgcttccggctcgtatgttgtgtggaattgtgagcggataacaatttcacacaggaaacagcatatgcaaacaagcattactctgacatccaacgcatccggtacgtttgacggttactattacgaactctggaaggatactggcaatacaacaatgacggtctacactcaaggtcgcttttcctgccagtggtcgaacatcaataacgcgttgtttaggaccgggaagaaatacaaccagaattggcagtctcttggcacaatccggatcacgtactctgcgacttacaacccaaacgggaactcctacttgtgtatctatggctggtctaccaacccattggtcgagttctacatcgttgagtcctgggggaactggagaccgcctggtgcctgccatccaaaggggacaaaggtcgtggtcaagggcaagggcatcgtgaatattgaggacgttaaggaggggaattacgttctcggcatcgacggctggcagaaggttaagaaggtctggaagtacgagtacgagggcgagctcattaacgttaatgggctgaagtgcacaccgaaccacaagatccccctccgctacaagattaagcataagaagatcaacaagaacgattacctggtgagggacatctacgcgaagtcgctcctgaccaagttcaagggcgaggggaagctcatcctgtgcaaggacttcgagacgattggcaactacgagaagtacatcaatgacatggatgaggacttcatcctcaagtccgagctgatcggcattctcctggctgaggggcacctcctgaggagggatatcgagtacttcgactccagccggggcaagaagcgcattagccatcagtaccgcgtggagatcacggtcaacgaggatgagaaggacttcatcgagaagattaagtacatcttcaagaagctcttcaactacgagctctacgtgcgccgcaagaagggcaccaaggccattacgctcgggtgcgcgaagaaggatatctacctcaagattgaggagatcctgaagaacaaggagaagtacctcccgaatgccatcctgcgggggttcttcgagggcgacggctacgtgaacacagttaggcgggctgtggtcgttaatcagggcactaacaattacgataagattaagttcatcgccagcctcctggacaggctcggcatcaagtacagcttctacacatactcgtacgaggagagggggaagaagctgaagcgctacgtgatcgagattttctctaagggcgacctcattaagttctcaatcctgatttcgttcatctctcgcaggaagaacaatctcctgaacgagatcattaggcagaagactctgtacaagatcggcgattacgggttctacgacctcgacgatgtgtgcgtctcactggagtcctacaagggcgaggtgtacgatctcactctggagggcaggccttactacttcgccaatggcatcctcactcataatacgtccctgggccaagtgacaatcgatggcgggacctacgacatctataggacgacacgcgtcaaccagccttccattgtggggacagccacgttcgatcagtactggagcgtgcgcacctctaagcggacttcaggaacagtgaccgtgaccgatcacttccgcgcctgggcgaaccggggcctgaacctcggcacaatagaccaaattacattgtgcgtggagggttaccaaagctctggatcagccaacatcacccagaacaccttctctcagggctcttcttccggcagttcgggtggctcatccggctccacaacgactactcgcatcgagtgtgagaacatgtccttgtccggaccctacgttagcaggatcaccaatccctttaatggtattgcgctgtacgccaacggagacacagcccgcgctaccgttaacttccccgcaagtcgcaactacaatttccgcctgcggggttgcggcaacaacaataatcttgcccgtgtggacctgaggatcgacggacggaccgtcgggaccttttattaccagggcacatacccctgggaggccccaattgacaatgtttatgtcagtgcggggagtcatacagtcgaaatcactgttactgcggataacggcacatgggacgtgtatgccgactacctggtgatacagtgactcgagggggggcccggtacccaattcgccctatagtgagtcgtattacaattcactggccgtcgttttacaacgtcgtgactgggaaaaccctggcgttacccaacttaatcgccttgcagcacatccccctttcgccagctggcgtaatagcgaagaggcccgcaccgatcgcccttcccaacagttgcgcagcctgaatggcgaatggaaattgtaagcgttaatattttgttaaaattcgcgttaaatttttgttaaatcagctcattttttaaccaataggccgaaatcggcaaaatcccttataaatcaaaagaatagaccgagatagggttgagtgttgttccagtttggaacaagagtccactattaaagaacgtggactccaacgtcaaagggcgaaaaaccgtctatcagggcgatggcccactacgtgaaccatcaccctaatcaagttttttggggtcgaggtgccgtaaagcactaaatcggaaccctaaagggagcccccgatttagagcttgacggggaaagccggcgaacgtggcgagaaaggaagggaagaaagcgaaaggagcgggcgctagggcgctggcaagtgtagcggtcacgctgcgcgtaaccaccacacccgccgcgcttaatgcgccgctacagggcgcgtcaggtg

SEQ ID NO: 3208 - DNA, 5258 bp, Artificial Sequence
  Synthetic Construct, AT-51 intein modified protein encoding nucleic acids in pBluescript
gcacttttcggggaaatgtgcgcggaacccctatttgtttatttttctaaatacattcaaatatgtatccgctcatgagacaataaccctgataaatgcttcaataatattgaaaaaggaagagtatgagtattcaacatttccgtgtcgcccttattcccttttttgcggcattttgccttcctgtttttgctcacccagaaacgctggtgaaagtaaaagatgctgaagatcagttgggtgcacgagtgggttacatcgaactggatctcaacagcggtaagatccttgagagttttcgccccgaagaacgttttccaatgatgagcacttttaaagttctgctatgtggcgcggtattatcccgtattgacgccgggcaagagcaactcggtcgccgcatacactattctcagaatgacttggttgagtactcaccagtcacagaaaagcatcttacggatggcatgacagtaagagaattatgcagtgctgccataaccatgagtgataacactgcggccaacttacttctgacaacgatcggaggaccgaaggagctaaccgcttttttgcacaacatgggggatcatgtaactcgccttgatcgttgggaaccggagctgaatgaagccataccaaacgacgagcgtgacaccacgatgcctgtagcaatggcaacaacgttgcgcaaactattaactggcgaactacttactctagcttcccggcaacaattaatagactggatggaggcggataaagttgcaggaccacttctgcgctcggcccttccggctggctggtttattgctgataaatctggagccggtgagcgtgggtctcgcggtatcattgcagcactggggccagatggtaagccctcccgtatcgtagttatctacacgacggggagtcaggcaactatggatgaacgaaatagacagatcgctgagataggtgcctcactgattaagcattggtaactgtcagaccaagtttactcatatatactttagattgatttaaaacttcatttttaatttaaaaggatctaggtgaagatcctttttgataatctcatgaccaaaatcccttaacgtgagttttcgttccactgagcgtcagaccccgtagaaaagatcaaaggatcttcttgagatcctttttttctgcgcgtaatctgctgcttgcaaacaaaaaaaccaccgctaccagcggtggtttgtttgccggatcaagagctaccaactctttttccgaaggtaactggcttcagcagagcgcagataccaaatactgtccttctagtgtagccgtagttaggccaccacttcaagaactctgtagcaccgcctacatacctcgctctgctaatcctgttaccagtggctgctgccagtggcgataagtcgtgtcttaccgggttggactcaagacgatagttaccggataaggcgcagcggtcgggctgaacggggggttcgtgcacacagcccagcttggagcgaacgacctacaccgaactgagatacctacagcgtgagctatgagaaagcgccacgcttcccgaagggagaaaggcggacaggtatccggtaagcggcagggtcggaacaggagagcgcacgagggagcttccagggggaaacgcctggtatctttatagtcctgtcgggtttcgccacctctgacttgagcgtcgatttttgtgatgctcgtcaggggggcggagcctatggaaaaacgccagcaacgcggcctttttacggttcctggccttttgctggccttttgctcacatgttctttcctgcgttatcccctgattctgtggataaccgtattaccgcctttgagtgagctgataccgctcgccgcagccgaacgaccgagcgcagcgagtcagtgagcgaggaagcggaagagcgcccaatacgcaaaccgcctctccccgcgcgttggccgattcattaatgcagctggcacgacaggtttcccgactggaaagcgggcagtgagcgcaacgcaattaatgtgagttagctcactcattaggcaccccaggctttacactttatgcttccggctcgtatgttgtgtggaattgtgagcggataacaatttcacacaggaaacagcatatgcaaacaagcattactctgacatccaacgcatccggtacgtttgacggttactattacgaactctggaaggatactggcaatacaacaatgacggtctacactcaaggtcgcttttcctgccagtggtcgaacatcaataacgcgttgtttaggaccgggaagaaatacaaccagaattggcagtctcttggcacaatccggatcacgtactctgcgacttacaacccaaacgggaactcctacttgtgtatctatggctggtctaccaacccattggtcgagttctacatcgttgagtcctgggggaactggagaccgcctggtgccagcattctccctgacgagtacctgactattattgaggaggatggcattaaggtcgtgaagatcggggagtacattgatgatctcatgcgcaagcacaaggacaagatcaagttctcgggcatctctgagattctggagacaaagaacctcaagactttctccttcgataagatcacgaagaagtgcgagattaagaaggtgaaggcgctgatcaggcacccatacttcggcaaggcttacaagatcaagctccggtctggccgcaccattaaggtcacgagggggcattcactgttcaagtacgagaacgggaagatcgtcgaggttaagggcgacgatgtgcggttcggggacctgatcgtggtcccaaagaagctcacctgcgtcgataaggaggttgtgatcaacattcctaagcggctgatcaatgctgacgaggaggagatcaaggatctcgtcattaccaagcacaaggacaaggccttcttcgttaagctcaagaagacgctggaggatatcgagaacaataagctcaaggtcatcttcgacgattgcattctctacctgaaggagctcggcctgatcgactacaacatcattaagaagattaataaggttgacatcaagattctggatgaggagaagttcaaggcctacaagaagtacttcgacaccgtcatcgagcatggcaacttcaagaaggggcgctgcaatattcagtacatcaagattaaggactacatcgcgaacattcccgacaaggagttcgaggattgcgagatcggcgcctactcggggaagattaatgcgctcctgaagctcgacgagaagctggctaagttcctcggcttcttcgtgacacgcgggaggctgaagaagcagaagctcaagggcgagactgtctacgagatctcagtttacaagtccctcccggagtaccagaaggagatcgctgagacattcaaggaggtcttcggcgccgggtccatggttaaggacaaagtgactatggataacaagatcgtgtacctcgtcctgaagtacattttcaagtgcggcgacaaggataagaagcacatccccgaggagctcttcctggcctccgagagcgtgatcaagagcttcctggacggcttcctcaaggccaagaagaacagccataaggggacctcgacgttcatggcgaaggatgagaagtacctcaaccagctgatgatcctcttcaatctggttggcattccgacaaggttcactcccgtgaagaacaagggctacaagctcaccctgaatccgaagtacgggacggtgaaggacctcatgctggatgaggtcaaggagatcgaggcgttcgagtacagcggctacgtctacgatctctctgtggaggataatgagaacttcctcgtcaacaacatctacgctcataatacgtccctgggccaagtgacaatcgatggcgggacctacgacatctataggacgacacgcgtcaaccagccttccattgtggggacagccacgttcgatcagtactggagcgtgcgcacctctaagcggacttcaggaacagtgaccgtgaccgatcacttccgcgcctgggcgaaccggggcctgaacctcggcacaatagaccaaattacattgtgcgtggagggttaccaaagctctggatcagccaacatcacccagaacaccttctctcagggctcttcttccggcagttcgggtggctcatccggctccacaacgactactcgcatcgagtgtgagaacatgtccttgtccggaccctacgttagcaggatcaccaatccctttaatggtattgcgctgtacgccaacggagacacagcccgcgctaccgttaacttccccgcaagtcgcaactacaatttccgcctgcggggttgcggcaacaacaataatcttgcccgtgtggacctgaggatcgacggacggaccgtcgggaccttttattaccagggcacatacccctgggaggccccaattgacaatgtttatgtcagtgcggggagtcatacagtcgaaatcactgttactgcggataacggcacatgggacgtgtatgccgactacctggtgatacagtgactcgagggggggcccggtacccaattcgccctatagtgagtcgtattacaattcactggccgtcgttttacaacgtcgtgactgggaaaaccctggcgttacccaacttaatcgccttgcagcacatccccctttcgccagctggcgtaatagcgaagaggcccgcaccgatcgcccttcccaacagttgcgcagcctgaatggcgaatggaaattgtaagcgttaatattttgttaaaattcgcgttaaatttttgttaaatcagctcattttttaaccaataggccgaaatcggcaaaatcccttataaatcaaaagaatagaccgagatagggttgagtgttgttccagtttggaacaagagtccactattaaagaacgtggactccaacgtcaaagggcgaaaaaccgtctatcagggcgatggcccactacgtgaaccatcaccctaatcaagttttttggggtcgaggtgccgtaaagcactaaatcggaaccctaaagggagcccccgatttagagcttgacggggaaagccggcgaacgtggcgagaaaggaagggaagaaagcgaaaggagcgggcgctagggcgctggcaagtgtagcggtcacgctgcgcgtaaccaccacacccgccgcgcttaatgcgccgctacagggcgcgtcaggtg

SEQ ID NO: 3209 - DNA, 5474 bp, Artificial Sequence
  Synthetic Construct, AT-52 intein modified protein encoding nucleic acids in pBluescript
gcacttttcggggaaatgtgcgcggaacccctatttgtttatttttctaaatacattcaaatatgtatccgctcatgagacaataaccctgataaatgcttcaataatattgaaaaaggaagagtatgagtattcaacatttccgtgtcgcccttattcccttttttgcggcattttgccttcctgtttttgctcacccagaaacgctggtgaaagtaaaagatgctgaagatcagttgggtgcacgagtgggttacatcgaactggatctcaacagcggtaagatccttgagagttttcgccccgaagaacgttttccaatgatgagcacttttaaagttctgctatgtggcgcggtattatcccgtattgacgccgggcaagagcaactcggtcgccgcatacactattctcagaatgacttggttgagtactcaccagtcacagaaaagcatcttacggatggcatgacagtaagagaattatgcagtgctgccataaccatgagtgataacactgcggccaacttacttctgacaacgatcggaggaccgaaggagctaaccgcttttttgcacaacatgggggatcatgtaactcgccttgatcgttgggaaccggagctgaatgaagccataccaaacgacgagcgtgacaccacgatgcctgtagcaatggcaacaacgttgcgcaaactattaactggcgaactacttactctagcttcccggcaacaattaatagactggatggaggcggataaagttgcaggaccacttctgcgctcggcccttccggctggctggtttattgctgataaatctggagccggtgagcgtgggtctcgcggtatcattgcagcactggggccagatggtaagccctcccgtatcgtagttatctacacgacggggagtcaggcaactatggatgaacgaaatagacagatcgctgagataggtgcctcactgattaagcattggtaactgtcagaccaagtttactcatatatactttagattgatttaaaacttcatttttaatttaaaaggatctaggtgaagatcctttttgataatctcatgaccaaaatcccttaacgtgagttttcgttccactgagcgtcagaccccgtagaaaagatcaaaggatcttcttgagatcctttttttctgcgcgtaatctgctgcttgcaaacaaaaaaaccaccgctaccagcggtggtttgtttgccggatcaagagctaccaactctttttccgaaggtaactggcttcagcagagcgcagataccaaatactgtccttctagtgtagccgtagttaggccaccacttcaagaactctgtagcaccgcctacatacctcgctctgctaatcctgttaccagtggctgctgccagtggcgataagtcgtgtcttaccgggttggactcaagacgatagttaccggataaggcgcagcggtcgggctgaacggggggttcgtgcacacagcccagcttggagcgaacgacctacaccgaactgagatacctacagcgtgagctatgagaaagcgccacgcttcccgaagggagaaaggcggacaggtatccggtaagcggcagggtcggaacaggagagcgcacgagggagcttccagggggaaacgcctggtatctttatagtcctgtcgggtttcgccacctctgacttgagcgtcgatttttgtgatgctcgtcaggggggcggagcctatggaaaaacgccagcaacgcggcctttttacggttcctggccttttgctggccttttgctcacatgttctttcctgcgttatcccctgattctgtggataaccgtattaccgcctttgagtgagctgataccgctcgccgcagccgaacgaccgagcgcagcgagtcagtgagcgaggaagcggaagagcgcccaatacgcaaaccgcctctccccgcgcgttggccgattcattaatgcagctggcacgacaggtttcccgactggaaagcgggcagtgagcgcaacgcaattaatgtgagttagctcactcattaggcaccccaggctttacactttatgcttccggctcgtatgttgtgtggaattgtgagcggataacaatttcacacaggaaacagcatatgcaaacaagcattactctgacatccaacgcatccggtacgtttgacggttactattacgaactctggaaggatactggcaatacaacaatgacggtctacactcaaggtcgcttttcctgccagtggtcgaacatcaataacgcgttgtttaggaccgggaagaaatacaaccagaattggcagtctcttggcacaatccggatcacgtactctgcgacttacaacccaaacgggaactcctacttgtgtatctatggctggtctaccaacccattggtcgagttctacatcgttgagtcctgggggaactggagaccgcctggtgcctgcctgacgggggacactaaggtcatcgtgaatggggagattcgggagatcggggaggttattgaggagatttctaacgggaagttcggcgtgacactcactaacaatctcaaggtcctgggcatcgacgaggatgggaagattcgcgagttcgacgtgcagtatgtgtacaaggataagaccaacacgctcatcaagattaagacaaagatgggcagggagctgaaggttaccacgtaccacccgctcctgatcaatcataagaacggcgagattaagtgggagaaggcggagaacctcaaggtcggggacaagctggctacgccccgctacatcctcttcaatgagagcgattacaacgaggagctcgctgagtggctgggctacttcatcggcgacgggcacgccgataaggagtcgaataagatcacattcactaacggggacgagaagctgcggaagcgcttcgccgagctcaccgagaagctgttcaaggatgcgaagatcaaggagcgcattcataaggacaggacgccagatatctacgtcaactccaaggaggcggttgagttcatcgacaagctcggcctgagggggaagaaggctgataaggtgcggatccctaaggagattatgcgctcagacgctctcagggcgttcctgagggcttacttcgactgcgatggcgggatcgagaagcactccattgttctcagcaccgcttcgaaggagatggccgaggacctggtgtacgctctcctgaggttcggcatcattgccaagctgcgggagaaggtcaacaagaacaataacaaggtttactaccatatcgtgatttccaactcctccaacctccgcaccttcctggacaacatcggcttctctcaggagaggaagctcaagaagctcctggagatcattaaggatgagaatccgaacctggacgtgatcacgattgataaggagaagatccggtacattagggaccggctcaaggtcaagctgacacgcgacatcgagaaggataattggtcctacaacaagtgcaggaagatcactcaggagctcctgaaggagatctactaccggctggaggagctgaaggagatcgagaaggccctggaggagaacatcctgattgactgggatgaggtggccgagcgcaggaaggagatcgcggagaagacaggcattcgctccgaccgcatcctggagtacattcgggggaagcgcaagccaagcctcaagaactacatcaagattgccaatactctgggcaagaacatcgagaagatcattgacgcgatgcggatcttcgctaagaagtactcgtcttacgcggagatcggcaagatgctgaatatgtggaactcatccatcaagatctacctggagtctaatacccaggagatcgagaagctggaggagattaggaagacggagctcaagctggtcaaggagatcctcaacgacgagaagctgatcgattctattggctacgtcctcttcctggcgtcaaatgagatctactgggacgagatcgttgagattgagcagctcaacggggagttcaccatctacgatctgcatgttccacgctaccacaacttcattgggggcaacctgcctactattctccacaacacgtccctgggccaagtgacaatcgatggcgggacctacgacatctataggacgacacgcgtcaaccagccttccattgtggggacagccacgttcgatcagtactggagcgtgcgcacctctaagcggacttcaggaacagtgaccgtgaccgatcacttccgcgcctgggcgaaccggggcctgaacctcggcacaatagaccaaattacattgtgcgtggagggttaccaaagctctggatcagccaacatcacccagaacaccttctctcagggctcttcttccggcagttcgggtggctcatccggctccacaacgactactcgcatcgagtgtgagaacatgtccttgtccggaccctacgttagcaggatcaccaatccctttaatggtattgcgctgtacgccaacggagacacagcccgcgctaccgttaacttccccgcaagtcgcaactacaatttccgcctgcggggttgcggcaacaacaataatcttgcccgtgtggacctgaggatcgacggacggaccgtcgggaccttttattaccagggcacatacccctgggaggccccaattgacaatgtttatgtcagtgcggggagtcatacagtcgaaatcactgttactgcggataacggcacatgggacgtgtatgccgactacctggtgatacagtgactcgagggggggcccggtacccaattcgccctatagtgagtcgtattacaattcactggccgtcgttttacaacgtcgtgactgggaaaaccctggcgttacccaacttaatcgccttgcagcacatccccctttcgccagctggcgtaatagcgaagaggcccgcaccgatcgcccttcccaacagttgcgcagcctgaatggcgaatggaaattgtaagcgttaatattttgttaaaattcgcgttaaatttttgttaaatcagctcattttttaaccaataggccgaaatcggcaaaatcccttataaatcaaaagaatagaccgagatagggttgagtgttgttccagtttggaacaagagtccactattaaagaacgtggactccaacgtcaaagggcgaaaaaccgtctatcagggcgatggcccactacgtgaaccatcaccctaatcaagttttttggggtcgaggtgccgtaaagcactaaatcggaaccctaaagggagcccccgatttagagcttgacggggaaagccggcgaacgtggcgagaaaggaagggaagaaagcgaaaggagcgggcgctagggcgctggcaagtgtagcggtcacgctgcgcgtaaccaccacacccgccgcgcttaatgcgccgctacagggcgcgtcaggtg

SEQ ID NO: 3210 - DNA, 5138 bp, Artificial Sequence
  Synthetic Construct, AT-53 intein modified protein encoding nucleic acids in pBluescript
gcacttttcggggaaatgtgcgcggaacccctatttgtttatttttctaaatacattcaaatatgtatccgctcatgagacaataaccctgataaatgcttcaataatattgaaaaaggaagagtatgagtattcaacatttccgtgtcgcccttattcccttttttgcggcattttgccttcctgtttttgctcacccagaaacgctggtgaaagtaaaagatgctgaagatcagttgggtgcacgagtgggttacatcgaactggatctcaacagcggtaagatccttgagagttttcgccccgaagaacgttttccaatgatgagcacttttaaagttctgctatgtggcgcggtattatcccgtattgacgccgggcaagagcaactcggtcgccgcatacactattctcagaatgacttggttgagtactcaccagtcacagaaaagcatcttacggatggcatgacagtaagagaattatgcagtgctgccataaccatgagtgataacactgcggccaacttacttctgacaacgatcggaggaccgaaggagctaaccgcttttttgcacaacatgggggatcatgtaactcgccttgatcgttgggaaccggagctgaatgaagccataccaaacgacgagcgtgacaccacgatgcctgtagcaatggcaacaacgttgcgcaaactattaactggcgaactacttactctagcttcccggcaacaattaatagactggatggaggcggataaagttgcaggaccacttctgcgctcggcccttccggctggctggtttattgctgataaatctggagccggtgagcgtgggtctcgcggtatcattgcagcactggggccagatggtaagccctcccgtatcgtagttatctacacgacggggagtcaggcaactatggatgaacgaaatagacagatcgctgagataggtgcctcactgattaagcattggtaactgtcagaccaagtttactcatatatactttagattgatttaaaacttcatttttaatttaaaaggatctaggtgaagatcctttttgataatctcatgaccaaaatcccttaacgtgagttttcgttccactgagcgtcagaccccgtagaaaagatcaaaggatcttcttgagatcctttttttctgcgcgtaatctgctgcttgcaaacaaaaaaaccaccgctaccagcggtggtttgtttgccggatcaagagctaccaactctttttccgaaggtaactggcttcagcagagcgcagataccaaatactgtccttctagtgtagccgtagttaggccaccacttcaagaactctgtagcaccgcctacatacctcgctctgctaatcctgttaccagtggctgctgccagtggcgataagtcgtgtcttaccgggttggactcaagacgatagttaccggataaggcgcagcggtcgggctgaacggggggttcgtgcacacagcccagcttggagcgaacgacctacaccgaactgagatacctacagcgtgagctatgagaaagcgccacgcttcccgaagggagaaaggcggacaggtatccggtaagcggcagggtcggaacaggagagcgcacgagggagcttccagggggaaacgcctggtatctttatagtcctgtcgggtttcgccacctctgacttgagcgtcgatttttgtgatgctcgtcaggggggcggagcctatggaaaaacgccagcaacgcggcctttttacggttcctggccttttgctggccttttgctcacatgttctttcctgcgttatcccctgattctgtggataaccgtattaccgcctttgagtgagctgataccgctcgccgcagccgaacgaccgagcgcagcgagtcagtgagcgaggaagcggaagagcgcccaatacgcaaaccgcctctccccgcgcgttggccgattcattaatgcagctggcacgacaggtttcccgactggaaagcgggcagtgagcgcaacgcaattaatgtgagttagctcactcattaggcaccccaggctttacactttatgcttccggctcgtatgttgtgtggaattgtgagcggataacaatttcacacaggaaacagcatatgcaaacaagcattactctgacatccaacgcatccggtacgtttgacggttactattacgaactctggaaggatactggcaatacaacaatgacggtctacactcaaggtcgcttttcctgccagtggtcgaacatcaataacgcgttgtttaggaccgggaagaaatacaaccagaattggcagtctcttggcacaatccggatcacgtactctgcgacttacaacccaaacgggaactcctacttgtgtatctatggctggtctaccaacccattggtcgagttctacatcgttgagtcctgggggaactggagaccgcctggtgcctcggtctctaaggacacacctattctcgtgaagattgatggcaaggttaagcgcactactttcgaggagctggacaagatctacttcgagaccaacgacgagaatgagatgtacaagaaggtggacaacctggaggtgctgacagtcgatgagaatttccgggttcgctggaggaaggtgtcgactatcattaggcacaaggtcgacaagatcctccggattaagttcgagggcgggtacattgagctgacgggcaaccattccatcatgatgctcgatgagaatgggctggtggccaagaaggcgagcgacatcaaggtcggcgattgcttcctctcgttcgtcgcgaacatcgagggcgagaaggaccggctcgatctgaaggagttcgagccaaaggacatcacctcccgcgtcaagatcattaacgacttcgatatcgacgaggatacggcttggatgctcggcctctacgtggctgagggcgctgttgggttcaagggcaagacctcaggccaggttatctacacgctcgggtcccacgagcatgacctcatcaacaagctgaatgacattgtggataagaagggcttcagcaagtacgagaatttcacaggctcggggttcgaccggaagcgcctgtctgcgaagcagatccgcattctcaacactcagctggctaggttcgtggaggagaacttctacgacggcaatgggcgcagggctaggaacaagcggatcccggatatcattttcgagctcaaggagaatctgagggtcgagttcctcaaggggctggctgacggcgattccagcgggaactggcgcgaggtggtcaggatttcgtctaagtctgacaatctcctgatcgatacagtgtggctcgccaggatctcaggcattgagtcatccattttcgagaacgaggcgcggctgatctggaagggcgggatgaagtggaagaagtctaatctcctgccggccgagcccatcattaagatgatcaagaagctggagaacaagattaacggcaattggcggtacatcctccgccaccagctgtacgagggcaagaagcgcgtctccaaggacaagatcaagcagattctggagatggtcaacgttgagaagctgtccgacaaggagaaggaggtttacgatctcctgaagaagctgagcaagaccgagctctacgcgctggttgtgaaggagatcgagatcattgactacaacgatttcgtctacgacgtctctgttccaaacaatgagatgttcttcgctggcaatgttccaattctgctccacaacacgtccctgggccaagtgacaatcgatggcgggacctacgacatctataggacgacacgcgtcaaccagccttccattgtggggacagccacgttcgatcagtactggagcgtgcgcacctctaagcggacttcaggaacagtgaccgtgaccgatcacttccgcgcctgggcgaaccggggcctgaacctcggcacaatagaccaaattacattgtgcgtggagggttaccaaagctctggatcagccaacatcacccagaacaccttctctcagggctcttcttccggcagttcgggtggctcatccggctccacaacgactactcgcatcgagtgtgagaacatgtccttgtccggaccctacgttagcaggatcaccaatccctttaatggtattgcgctgtacgccaacggagacacagcccgcgctaccgttaacttccccgcaagtcgcaactacaatttccgcctgcggggttgcggcaacaacaataatcttgcccgtgtggacctgaggatcgacggacggaccgtcgggaccttttattaccagggcacatacccctgggaggccccaattgacaatgtttatgtcagtgcggggagtcatacagtcgaaatcactgttactgcggataacggcacatgggacgtgtatgccgactacctggtgatacagtgactcgagggggggcccggtacccaattcgccctatagtgagtcgtattacaattcactggccgtcgttttacaacgtcgtgactgggaaaaccctggcgttacccaacttaatcgccttgcagcacatccccctttcgccagctggcgtaatagcgaagaggcccgcaccgatcgcccttcccaacagttgcgcagcctgaatggcgaatggaaattgtaagcgttaatattttgttaaaattcgcgttaaatttttgttaaatcagctcattttttaaccaataggccgaaatcggcaaaatcccttataaatcaaaagaatagaccgagatagggttgagtgttgttccagtttggaacaagagtccactattaaagaacgtggactccaacgtcaaagggcgaaaaaccgtctatcagggcgatggcccactacgtgaaccatcaccctaatcaagttttttggggtcgaggtgccgtaaagcactaaatcggaaccctaaagggagcccccgatttagagcttgacggggaaagccggcgaacgtggcgagaaaggaagggaagaaagcgaaaggagcgggcgctagggcgctggcaagtgtagcggtcacgctgcgcgtaaccaccacacccgccgcgcttaatgcgccgctacagggcgcgtcaggtg

SEQ ID NO: 3211 - DNA, 5459 bp, Artificial Sequence
  Synthetic Construct, AT-54 intein modified protein encoding nucleic acids in pBluescript
gcacttttcggggaaatgtgcgcggaacccctatttgtttatttttctaaatacattcaaatatgtatccgctcatgagacaataaccctgataaatgcttcaataatattgaaaaaggaagagtatgagtattcaacatttccgtgtcgcccttattcccttttttgcggcattttgccttcctgtttttgctcacccagaaacgctggtgaaagtaaaagatgctgaagatcagttgggtgcacgagtgggttacatcgaactggatctcaacagcggtaagatccttgagagttttcgccccgaagaacgttttccaatgatgagcacttttaaagttctgctatgtggcgcggtattatcccgtattgacgccgggcaagagcaactcggtcgccgcatacactattctcagaatgacttggttgagtactcaccagtcacagaaaagcatcttacggatggcatgacagtaagagaattatgcagtgctgccataaccatgagtgataacactgcggccaacttacttctgacaacgatcggaggaccgaaggagctaaccgcttttttgcacaacatgggggatcatgtaactcgccttgatcgttgggaaccggagctgaatgaagccataccaaacgacgagcgtgacaccacgatgcctgtagcaatggcaacaacgttgcgcaaactattaactggcgaactacttactctagcttcccggcaacaattaatagactggatggaggcggataaagttgcaggaccacttctgcgctcggcccttccggctggctggtttattgctgataaatctggagccggtgagcgtgggtctcgcggtatcattgcagcactggggccagatggtaagccctcccgtatcgtagttatctacacgacggggagtcaggcaactatggatgaacgaaatagacagatcgctgagataggtgcctcactgattaagcattggtaactgtcagaccaagtttactcatatatactttagattgatttaaaacttcatttttaatttaaaaggatctaggtgaagatcctttttgataatctcatgaccaaaatcccttaacgtgagttttcgttccactgagcgtcagaccccgtagaaaagatcaaaggatcttcttgagatcctttttttctgcgcgtaatctgctgcttgcaaacaaaaaaaccaccgctaccagcggtggtttgtttgccggatcaagagctaccaactctttttccgaaggtaactggcttcagcagagcgcagataccaaatactgtccttctagtgtagccgtagttaggccaccacttcaagaactctgtagcaccgcctacatacctcgctctgctaatcctgttaccagtggctgctgccagtggcgataagtcgtgtcttaccgggttggactcaagacgatagttaccggataaggcgcagcggtcgggctgaacggggggttcgtgcacacagcccagcttggagcgaacgacctacaccgaactgagatacctacagcgtgagctatgagaaagcgccacgcttcccgaagggagaaaggcggacaggtatccggtaagcggcagggtcggaacaggagagcgcacgagggagcttccagggggaaacgcctggtatctttatagtcctgtcgggtttcgccacctctgacttgagcgtcgatttttgtgatgctcgtcaggggggcggagcctatggaaaaacgccagcaacgcggcctttttacggttcctggccttttgctggccttttgctcacatgttctttcctgcgttatcccctgattctgtggataaccgtattaccgcctttgagtgagctgataccgctcgccgcagccgaacgaccgagcgcagcgagtcagtgagcgaggaagcggaagagcgcccaatacgcaaaccgcctctccccgcgcgttggccgattcattaatgcagctggcacgacaggtttcccgactggaaagcgggcagtgagcgcaacgcaattaatgtgagttagctcactcattaggcaccccaggctttacactttatgcttccggctcgtatgttgtgtggaattgtgagcggataacaatttcacacaggaaacagcatatgcaaacaagcattactctgacatccaacgcatccggtacgtttgacggttactattacgaactctggaaggatactggcaatacaacaatgacggtctacactcaaggtcgcttttcctgccagtggtcgaacatcaataacgcgttgtttaggaccgggaagaaatacaaccagaattggcagtctcttggcacaatccggatcacgtactctgcgacttacaacccaaacgggaactcctacttgtgtatctatggctggtctaccaacccattggtcgagttctacatcgttgagtcctgggggaactggagaccgcctggtgcctgcctgacgggggacgctaagattactctgcctgacgagcgggagatcaagattgaggatttcattaagatgttcgaggagcgcaagctgaagcacgtcctcaacaggaatggggaggacctggtgctcgctggcgtcaagttcaactccaagatcgttaatcacaaggtgtacaggctggtcctggagagcgggagggagatcgaggctaccggcgaccataagttcctgacgagggatggctggaaggaggtgtacgagctcaaggaggacgatgaggttctggtgtacccggctctggagggcgttgggttcgaggtggacgagcgcaggatcattggcctgaacgagttctacgagttcctcacaaattacgagatcaagctggggtacaagccactcggcaaggcgaagtcatacaaggagctgattactcgcgacaaggagaagatcctctctagggtcctggagctctccgataagtactccaagagcgagatccggcgcaagattgaggaggagttcggcatcaagatttctctgaccacgatcaagaacctcattaatgggaagatcgacggcttcgccctgaagtatgtgcgcaagatcaaggagctcggctgggatgagatcacctacgacgatgagaaggctgggatcttcgccaggctcctgggcttcatcattggcgacgggcacctgtcgaagtctaaggagggccggatcctgattacagctactattaacgagctggaggggatcaagaaggatctggagaagctcggcatcaaggcctcgaacatcattgagaaggacattgagcataagctcgatgggagggagatcaagggcaagacctctttcatctacattaacaataaggccttctacctcctgctcaacttctggggggtcgagattggcaataagacgatcaacgggtacaatattccaaagtggatcaagtacggcaacaagttcgttaagagggagttcctgaggggcctcttcggggctgacggcacaaagccttacatcaagaagtacaacatcaatgggattaagctgggcattcgggtggagaacatctccaaggataagactctggagttcttcgaggaggtcaagaagatgctggaggagttcgaggtcgagagctacattaaggtttcgaagatcgacaacaagaatctgaccgagctcatcgtcaaggccaacaataagaactacctgaagtacctctcaaggatctcctacgcgtacgagaaggacaatttcgctaggctggtgggcgagtacctccggatcaaggaggcgtacaaggacatcattctgaaggagatcgccgagaacgcgctcaaggaggccgatggcgagaagagcctgagggagctcgctaggaagtacaacgtcccggttgacttcatcattaatcagctgaaggggaaggatatcggcctcccccgcaacttcatgacgttcgaggagttcctcaaggagaaggtggtcgacggcaagtatgtgtccgagcggatcattaagaaggagtgcatcggctaccgcgatgtgtacgacattacttgccacaaggatccttctttcattgctaacggcttcgtctctcataacacgtccctgggccaagtgacaatcgatggcgggacctacgacatctataggacgacacgcgtcaaccagccttccattgtggggacagccacgttcgatcagtactggagcgtgcgcacctctaagcggacttcaggaacagtgaccgtgaccgatcacttccgcgcctgggcgaaccggggcctgaacctcggcacaatagaccaaattacattgtgcgtggagggttaccaaagctctggatcagccaacatcacccagaacaccttctctcagggctcttcttccggcagttcgggtggctcatccggctccacaacgactactcgcatcgagtgtgagaacatgtccttgtccggaccctacgttagcaggatcaccaatccctttaatggtattgcgctgtacgccaacggagacacagcccgcgctaccgttaacttccccgcaagtcgcaactacaatttccgcctgcggggttgcggcaacaacaataatcttgcccgtgtggacctgaggatcgacggacggaccgtcgggaccttttattaccagggcacatacccctgggaggccccaattgacaatgtttatgtcagtgcggggagtcatacagtcgaaatcactgttactgcggataacggcacatgggacgtgtatgccgactacctggtgatacagtgactcgagggggggcccggtacccaattcgccctatagtgagtcgtattacaattcactggccgtcgttttacaacgtcgtgactgggaaaaccctggcgttacccaacttaatcgccttgcagcacatccccctttcgccagctggcgtaatagcgaagaggcccgcaccgatcgcccttcccaacagttgcgcagcctgaatggcgaatggaaattgtaagcgttaatattttgttaaaattcgcgttaaatttttgttaaatcagctcattttttaaccaataggccgaaatcggcaaaatcccttataaatcaaaagaatagaccgagatagggttgagtgttgttccagtttggaacaagagtccactattaaagaacgtggactccaacgtcaaagggcgaaaaaccgtctatcagggcgatggcccactacgtgaaccatcaccctaatcaagttttttggggtcgaggtgccgtaaagcactaaatcggaaccctaaagggagcccccgatttagagcttgacggggaaagccggcgaacgtggcgagaaaggaagggaagaaagcgaaaggagcgggcgctagggcgctggcaagtgtagcggtcacgctgcgcgtaaccaccacacccgccgcgcttaatgcgccgctacagggcgcgtcaggtg

SEQ ID NO: 3212 - DNA, 5312 bp, Artificial Sequence
  Synthetic Construct, AT-55 intein modified protein encoding nucleic acids in pBluescript
gcacttttcggggaaatgtgcgcggaacccctatttgtttatttttctaaatacattcaaatatgtatccgctcatgagacaataaccctgataaatgcttcaataatattgaaaaaggaagagtatgagtattcaacatttccgtgtcgcccttattcccttttttgcggcattttgccttcctgtttttgctcacccagaaacgctggtgaaagtaaaagatgctgaagatcagttgggtgcacgagtgggttacatcgaactggatctcaacagcggtaagatccttgagagttttcgccccgaagaacgttttccaatgatgagcacttttaaagttctgctatgtggcgcggtattatcccgtattgacgccgggcaagagcaactcggtcgccgcatacactattctcagaatgacttggttgagtactcaccagtcacagaaaagcatcttacggatggcatgacagtaagagaattatgcagtgctgccataaccatgagtgataacactgcggccaacttacttctgacaacgatcggaggaccgaaggagctaaccgcttttttgcacaacatgggggatcatgtaactcgccttgatcgttgggaaccggagctgaatgaagccataccaaacgacgagcgtgacaccacgatgcctgtagcaatggcaacaacgttgcgcaaactattaactggcgaactacttactctagcttcccggcaacaattaatagactggatggaggcggataaagttgcaggaccacttctgcgctcggcccttccggctggctggtttattgctgataaatctggagccggtgagcgtgggtctcgcggtatcattgcagcactggggccagatggtaagccctcccgtatcgtagttatctacacgacggggagtcaggcaactatggatgaacgaaatagacagatcgctgagataggtgcctcactgattaagcattggtaactgtcagaccaagtttactcatatatactttagattgatttaaaacttcatttttaatttaaaaggatctaggtgaagatcctttttgataatctcatgaccaaaatcccttaacgtgagttttcgttccactgagcgtcagaccccgtagaaaagatcaaaggatcttcttgagatcctttttttctgcgcgtaatctgctgcttgcaaacaaaaaaaccaccgctaccagcggtggtttgtttgccggatcaagagctaccaactctttttccgaaggtaactggcttcagcagagcgcagataccaaatactgtccttctagtgtagccgtagttaggccaccacttcaagaactctgtagcaccgcctacatacctcgctctgctaatcctgttaccagtggctgctgccagtggcgataagtcgtgtcttaccgggttggactcaagacgatagttaccggataaggcgcagcggtcgggctgaacggggggttcgtgcacacagcccagcttggagcgaacgacctacaccgaactgagatacctacagcgtgagctatgagaaagcgccacgcttcccgaagggagaaaggcggacaggtatccggtaagcggcagggtcggaacaggagagcgcacgagggagcttccagggggaaacgcctggtatctttatagtcctgtcgggtttcgccacctctgacttgagcgtcgatttttgtgatgctcgtcaggggggcggagcctatggaaaaacgccagcaacgcggcctttttacggttcctggccttttgctggccttttgctcacatgttctttcctgcgttatcccctgattctgtggataaccgtattaccgcctttgagtgagctgataccgctcgccgcagccgaacgaccgagcgcagcgagtcagtgagcgaggaagcggaagagcgcccaatacgcaaaccgcctctccccgcgcgttggccgattcattaatgcagctggcacgacaggtttcccgactggaaagcgggcagtgagcgcaacgcaattaatgtgagttagctcactcattaggcaccccaggctttacactttatgcttccggctcgtatgttgtgtggaattgtgagcggataacaatttcacacaggaaacagcatatgcaaacaagcattactctgacatccaacgcatccggtacgtttgacggttactattacgaactctggaaggatactggcaatacaacaatgacggtctacactcaaggtcgcttttcctgccagtggtcgaacatcaataacgcgttgtttaggaccgggaagaaatacaaccagaattggcagtctcttggcacaatccggatcacgtactctgcgacttacaacccaaacgggaactcctacttgtgtatctatggctggtctaccaacccattggtcgagttctacatcgttgagtcctgggggaactggagaccgcctggtgcctgcctgacaccggacacatacgtggttctcggggacgggcggattgagactattgaggacatcgtgaatgctaaggagcgcaacgtgctctccctggacctcgataacctcagcatcaagattgacacggcgatcaagttctggaagctgcgctacaacggcaatctgagcaagatcacactctcgaacaattacgagctcaaggctactccggaccactgcctcctggtgctgagggataaccagctcaagtggatccccgccaaggacattaaggagaacgattacatcgcgatgccgttcaattacaaggtcgagcggaagcccatctccctcctgaacctcctgaagtacctggacatcacagatgttctcattgagttcgacgagaactccactatcttcgagaagattgccgagtacatccgcaacaatattaagacctcaacgaagtacaagtacctcaggaaccgcagggtcccgctgaagtacctcatcgagtggaatttcgacctggatgagattgagaaggaggctaagtacatctacaagtccgttgccgggaccaagaagatccccctgttcaagctcgacgagaggttctggtacttcgctggcctggtcctcggcgacgggtcgatccaggattctaagatccggattgcccagaccccactgaaggacgtgaagagcattctcgatgagacgttccctttcctgcacaactggatctcgggcaatcaggtcatcatttctaacccaatcattgccgagatcctggagaagctcggcatgaggaacgggaagctcaatggcatcattttctcactgcctgagtcctacatcaacgccctcattgcggggtacttcgacaccgatggctgcttctcgctcctgtacgacaagaaggcgaagaagcacaacctgcgcatggtcctcacgtcaaagcggcgcgatgttctggagaagatcgggatctacctcaactccatcggcattctgaatacactccataagtctagggaggtgtactcactcatcatttccaacaagagcctggagactttcaaggagaagatcgcgaagtacctgaagattcggaaggaggctttcatcaacggctacaagacatacaagaaggagcatgaggagcgcttcgagtgcgacctcctgccagttaaggaggtgttcaagaagctcaccttcgagaagggccggaaggagatcctgaaggactccaagatccacattgagaactggtacaaggagaagaccaacaatatcccgagggagaagctgaagacggttctccggtacgcgaacaatagcgagcataaggagttcctggagaagatcgtgaacggggacatttcgttcgtgcgcgtcaagaaggtggagaatatcccgtacgatggctacgtctacgatctctctatcaagcataatcagaacttcatctctaatggggtcatttcacacaacacgtccctgggccaagtgacaatcgatggcgggacctacgacatctataggacgacacgcgtcaaccagccttccattgtggggacagccacgttcgatcagtactggagcgtgcgcacctctaagcggacttcaggaacagtgaccgtgaccgatcacttccgcgcctgggcgaaccggggcctgaacctcggcacaatagaccaaattacattgtgcgtggagggttaccaaagctctggatcagccaacatcacccagaacaccttctctcagggctcttcttccggcagttcgggtggctcatccggctccacaacgactactcgcatcgagtgtgagaacatgtccttgtccggaccctacgttagcaggatcaccaatccctttaatggtattgcgctgtacgccaacggagacacagcccgcgctaccgttaacttccccgcaagtcgcaactacaatttccgcctgcggggttgcggcaacaacaataatcttgcccgtgtggacctgaggatcgacggacggaccgtcgggaccttttattaccagggcacatacccctgggaggccccaattgacaatgtttatgtcagtgcggggagtcatacagtcgaaatcactgttactgcggataacggcacatgggacgtgtatgccgactacctggtgatacagtgactcgagggggggcccggtacccaattcgccctatagtgagtcgtattacaattcactggccgtcgttttacaacgtcgtgactgggaaaaccctggcgttacccaacttaatcgccttgcagcacatccccctttcgccagctggcgtaatagcgaagaggcccgcaccgatcgcccttcccaacagttgcgcagcctgaatggcgaatggaaattgtaagcgttaatattttgttaaaattcgcgttaaatttttgttaaatcagctcattttttaaccaataggccgaaatcggcaaaatcccttataaatcaaaagaatagaccgagatagggttgagtgttgttccagtttggaacaagagtccactattaaagaacgtggactccaacgtcaaagggcgaaaaaccgtctatcagggcgatggcccactacgtgaaccatcaccctaatcaagttttttggggtcgaggtgccgtaaagcactaaatcggaaccctaaagggagcccccgatttagagcttgacggggaaagccggcgaacgtggcgagaaaggaagggaagaaagcgaaaggagcgggcgctagggcgctggcaagtgtagcggtcacgctgcgcgtaaccaccacacccgccgcgcttaatgcgccgctacagggcgcgtcaggtg

SEQ ID NO: 3213 - DNA, 5189 bp, Artificial Sequence
  Synthetic Construct, AT-56 intein modified protein encoding nucleic acids in pBluescript
gcacttttcggggaaatgtgcgcggaacccctatttgtttatttttctaaatacattcaaatatgtatccgctcatgagacaataaccctgataaatgcttcaataatattgaaaaaggaagagtatgagtattcaacatttccgtgtcgcccttattcccttttttgcggcattttgccttcctgtttttgctcacccagaaacgctggtgaaagtaaaagatgctgaagatcagttgggtgcacgagtgggttacatcgaactggatctcaacagcggtaagatccttgagagttttcgccccgaagaacgttttccaatgatgagcacttttaaagttctgctatgtggcgcggtattatcccgtattgacgccgggcaagagcaactcggtcgccgcatacactattctcagaatgacttggttgagtactcaccagtcacagaaaagcatcttacggatggcatgacagtaagagaattatgcagtgctgccataaccatgagtgataacactgcggccaacttacttctgacaacgatcggaggaccgaaggagctaaccgcttttttgcacaacatgggggatcatgtaactcgccttgatcgttgggaaccggagctgaatgaagccataccaaacgacgagcgtgacaccacgatgcctgtagcaatggcaacaacgttgcgcaaactattaactggcgaactacttactctagcttcccggcaacaattaatagactggatggaggcggataaagttgcaggaccacttctgcgctcggcccttccggctggctggtttattgctgataaatctggagccggtgagcgtgggtctcgcggtatcattgcagcactggggccagatggtaagccctcccgtatcgtagttatctacacgacggggagtcaggcaactatggatgaacgaaatagacagatcgctgagataggtgcctcactgattaagcattggtaactgtcagaccaagtttactcatatatactttagattgatttaaaacttcatttttaatttaaaaggatctaggtgaagatcctttttgataatctcatgaccaaaatcccttaacgtgagttttcgttccactgagcgtcagaccccgtagaaaagatcaaaggatcttcttgagatcctttttttctgcgcgtaatctgctgcttgcaaacaaaaaaaccaccgctaccagcggtggtttgtttgccggatcaagagctaccaactctttttccgaaggtaactggcttcagcagagcgcagataccaaatactgtccttctagtgtagccgtagttaggccaccacttcaagaactctgtagcaccgcctacatacctcgctctgctaatcctgttaccagtggctgctgccagtggcgataagtcgtgtcttaccgggttggactcaagacgatagttaccggataaggcgcagcggtcgggctgaacggggggttcgtgcacacagcccagcttggagcgaacgacctacaccgaactgagatacctacagcgtgagctatgagaaagcgccacgcttcccgaagggagaaaggcggacaggtatccggtaagcggcagggtcggaacaggagagcgcacgagggagcttccagggggaaacgcctggtatctttatagtcctgtcgggtttcgccacctctgacttgagcgtcgatttttgtgatgctcgtcaggggggcggagcctatggaaaaacgccagcaacgcggcctttttacggttcctggccttttgctggccttttgctcacatgttctttcctgcgttatcccctgattctgtggataaccgtattaccgcctttgagtgagctgataccgctcgccgcagccgaacgaccgagcgcagcgagtcagtgagcgaggaagcggaagagcgcccaatacgcaaaccgcctctccccgcgcgttggccgattcattaatgcagctggcacgacaggtttcccgactggaaagcgggcagtgagcgcaacgcaattaatgtgagttagctcactcattaggcaccccaggctttacactttatgcttccggctcgtatgttgtgtggaattgtgagcggataacaatttcacacaggaaacagcatatgcaaacaagcattactctgacatccaacgcatccggtacgtttgacggttactattacgaactctggaaggatactggcaatacaacaatgacggtctacactcaaggtcgcttttcctgccagtggtcgaacatcaataacgcgttgtttaggaccgggaagaaatacaaccagaattggcagtctcttggcacaatccggatcacgtactctgcgacttacaacccaaacgggaactcctacttgtgtatctatggctggtctaccaacccattggtcgagttctacatcgttgagtcctgggggaactggagaccgcctggtgcctcgctggggcgggatgagctgattttcattaaggagggggacaagctgaaggtttgcaagatcggggaggctattgatgagttcatggagaagtacaaggataagatcattgttgatggggacacggagatcctgtacctcgacggcattgctgaggtgtacaccatctccgtgaacgtcaagacggggaaggccgagttcaagagggtctacgcgatcagccgccacaagccgaggggcaaggtctacaaggttatcggcaaggacgggacctctatcattgttacggaggatcactcactcttcaactacgacgagaacggcaatctggtttgcgtgaagccgcgccagatgaagcatatcattaggaacttcaacaatccctacgatgtggagtaccggatcggcgactacattgagacaaattaccagaggactgattccaagtacaacagccggcagaatgacattcccgagaagctcaagatcacaaaggagctgtgccagttcctgggcctcttcgtcgcggaggggtcatacatcactaacggcatctccattaccacgaaggacgatgacatcgctaagttcattgagcggttcgtgaaggagcagatcaacgagaatattgccgtcaagcgctacgaggattcggtgcggttcgtcaacaaggggttctaccgcttcctcaaggagcacatcaatggcaaggcgattaacaagaatagcccggagttcatcctgaagggcgacaaggagatgaagctggctttcctcggcgggctgatctcgggcgatggctacgtgtccaaggacggccgcgtgcagatctacacaacttccgagcagctcctggggcagctccatctcctgctcagcgacctgggcatgatctactcgattacaaagatcaaggaggagggcgagaagatcgagattaagcggaacgagatcgtccgcaattacaagctctacgttatcgagattgccaagaactgcaccgaggacctgaagccctacgtgatccccaagtacaagaaggagaggatcaagccagcgaactacgatcagctcccttacgactaccggatcattaaggagcacctgcgcaagatcaccgataagaagccatacaacgactacgcctggaagtccaacaatcgcaagctgaagctcaacacgctggagaagatcgagcagctcaatccacatctgagggaggagattaacaagttcaagctgaatatccctttcgagattaaggagatcaaggagattgactacaacggctacgtctacgatctctcagtggaggataatgagaacttcatcacagctacaggcatcctctgccacaacacgtccctgggccaagtgacaatcgatggcgggacctacgacatctataggacgacacgcgtcaaccagccttccattgtggggacagccacgttcgatcagtactggagcgtgcgcacctctaagcggacttcaggaacagtgaccgtgaccgatcacttccgcgcctgggcgaaccggggcctgaacctcggcacaatagaccaaattacattgtgcgtggagggttaccaaagctctggatcagccaacatcacccagaacaccttctctcagggctcttcttccggcagttcgggtggctcatccggctccacaacgactactcgcatcgagtgtgagaacatgtccttgtccggaccctacgttagcaggatcaccaatccctttaatggtattgcgctgtacgccaacggagacacagcccgcgctaccgttaacttccccgcaagtcgcaactacaatttccgcctgcggggttgcggcaacaacaataatcttgcccgtgtggacctgaggatcgacggacggaccgtcgggaccttttattaccagggcacatacccctgggaggccccaattgacaatgtttatgtcagtgcggggagtcatacagtcgaaatcactgttactgcggataacggcacatgggacgtgtatgccgactacctggtgatacagtgactcgagggggggcccggtacccaattcgccctatagtgagtcgtattacaattcactggccgtcgttttacaacgtcgtgactgggaaaaccctggcgttacccaacttaatcgccttgcagcacatccccctttcgccagctggcgtaatagcgaagaggcccgcaccgatcgcccttcccaacagttgcgcagcctgaatggcgaatggaaattgtaagcgttaatattttgttaaaattcgcgttaaatttttgttaaatcagctcattttttaaccaataggccgaaatcggcaaaatcccttataaatcaaaagaatagaccgagatagggttgagtgttgttccagtttggaacaagagtccactattaaagaacgtggactccaacgtcaaagggcgaaaaaccgtctatcagggcgatggcccactacgtgaaccatcaccctaatcaagttttttggggtcgaggtgccgtaaagcactaaatcggaaccctaaagggagcccccgatttagagcttgacggggaaagccggcgaacgtggcgagaaaggaagggaagaaagcgaaaggagcgggcgctagggcgctggcaagtgtagcggtcacgctgcgcgtaaccaccacacccgccgcgcttaatgcgccgctacagggcgcgtcaggtg

SEQ ID NO: 3214 - DNA, 5429 bp, Artificial Sequence
  Synthetic Construct, AT-57 intein modified protein encoding nucleic acids in pBluescript
gcacttttcggggaaatgtgcgcggaacccctatttgtttatttttctaaatacattcaaatatgtatccgctcatgagacaataaccctgataaatgcttcaataatattgaaaaaggaagagtatgagtattcaacatttccgtgtcgcccttattcccttttttgcggcattttgccttcctgtttttgctcacccagaaacgctggtgaaagtaaaagatgctgaagatcagttgggtgcacgagtgggttacatcgaactggatctcaacagcggtaagatccttgagagttttcgccccgaagaacgttttccaatgatgagcacttttaaagttctgctatgtggcgcggtattatcccgtattgacgccgggcaagagcaactcggtcgccgcatacactattctcagaatgacttggttgagtactcaccagtcacagaaaagcatcttacggatggcatgacagtaagagaattatgcagtgctgccataaccatgagtgataacactgcggccaacttacttctgacaacgatcggaggaccgaaggagctaaccgcttttttgcacaacatgggggatcatgtaactcgccttgatcgttgggaaccggagctgaatgaagccataccaaacgacgagcgtgacaccacgatgcctgtagcaatggcaacaacgttgcgcaaactattaactggcgaactacttactctagcttcccggcaacaattaatagactggatggaggcggataaagttgcaggaccacttctgcgctcggcccttccggctggctggtttattgctgataaatctggagccggtgagcgtgggtctcgcggtatcattgcagcactggggccagatggtaagccctcccgtatcgtagttatctacacgacggggagtcaggcaactatggatgaacgaaatagacagatcgctgagataggtgcctcactgattaagcattggtaactgtcagaccaagtttactcatatatactttagattgatttaaaacttcatttttaatttaaaaggatctaggtgaagatcctttttgataatctcatgaccaaaatcccttaacgtgagttttcgttccactgagcgtcagaccccgtagaaaagatcaaaggatcttcttgagatcctttttttctgcgcgtaatctgctgcttgcaaacaaaaaaaccaccgctaccagcggtggtttgtttgccggatcaagagctaccaactctttttccgaaggtaactggcttcagcagagcgcagataccaaatactgtccttctagtgtagccgtagttaggccaccacttcaagaactctgtagcaccgcctacatacctcgctctgctaatcctgttaccagtggctgctgccagtggcgataagtcgtgtcttaccgggttggactcaagacgatagttaccggataaggcgcagcggtcgggctgaacggggggttcgtgcacacagcccagcttggagcgaacgacctacaccgaactgagatacctacagcgtgagctatgagaaagcgccacgcttcccgaagggagaaaggcggacaggtatccggtaagcggcagggtcggaacaggagagcgcacgagggagcttccagggggaaacgcctggtatctttatagtcctgtcgggtttcgccacctctgacttgagcgtcgatttttgtgatgctcgtcaggggggcggagcctatggaaaaacgccagcaacgcggcctttttacggttcctggccttttgctggccttttgctcacatgttctttcctgcgttatcccctgattctgtggataaccgtattaccgcctttgagtgagctgataccgctcgccgcagccgaacgaccgagcgcagcgagtcagtgagcgaggaagcggaagagcgcccaatacgcaaaccgcctctccccgcgcgttggccgattcattaatgcagctggcacgacaggtttcccgactggaaagcgggcagtgagcgcaacgcaattaatgtgagttagctcactcattaggcaccccaggctttacactttatgcttccggctcgtatgttgtgtggaattgtgagcggataacaatttcacacaggaaacagcatatgcaaacaagcattactctgacatccaacgcatccggtacgtttgacggttactattacgaactctggaaggatactggcaatacaacaatgacggtctacactcaaggtcgcttttcctgccagtggtcgaacatcaataacgcgttgtttaggaccgggaagaaatacaaccagaattggcagtctcttggcacaatccggatcacgtactctgcgacttacaacccaaacgggaactcctacttgtgtatctatggctggtctaccaacccattggtcgagttctacatcgttgagtcctgggggaactggagaccgcctggtgcctcgctcccttacgatgagaagatcctcattttcgagaataacgagtacaagctggtcaagatcggggagttcgtggagaagtacctcaaccgctacaaggacagggccatcacctacggcgataacaatatcgaggtgtacattaaggacgagaatatctacgccccatcgttcgacaaggatggcaagatcgtcctgaagcctatcacgcacgcgattcggcatcgcgggaaggagatctacgagattgagctggagtcgggcaagaaggttagggtgaccggggaccactctgtgttcacgatcaacgacaatctggatgtggtcgaggtcaaggctagcgacctcaaggttggcgatttcatcattacaccgaagatcattccctcaatctccaaggacaagatctacctctcggagatcgtcaagaacaaggacaagtactacgttaagatcaaggatcacatcaagttcattgaggagcatgaggagatcctcaaggagtcctacaaggagtacaagactaagtggaaggacctgaagccggttctcaagaagaagaacgcgttccggctcgatctgatcgaggacctggtcgataaggagaagatcgagaagatttcttacggccacgctaactacatcaacaataagattaagctcgacgagaagttcggctacctgatcggggccttcctctcagagggccattggaacgacaagtgcgtggagatttccagcaccaacaaggagttcatcgagaatctggtcgagatcattgaggagattctcggcaaggacgcgtactacatcacagtgaagggggacaagcgcaggtacaaggacctctacgtgatcggcctcaacaagactgtcgctatgatcttcgagtccctcgggctgaacaagctgtcgtctaataaggagatcccgagcattctcctgtcgaatgagacgttcctgaagggcctcatcaaggggtacattgacggcgatgggtcaatctacgtcgacgagtctaagcgggattactcaatccgcctgtacaccacgtccgagacactccgcgacactctctgcctggcgctcaagatcctgggcattaactaccggctctccatcgacaagaagagcaaggttaacgagaattggcgcgattgctacgtgatcaagattaccggcaaggagaacattgagaagctcctggacgtcgagatcaagaacaatggcgggaaggatgttatcccgaagattgccgagaagttcaaggagatcattaaccagtactcccagagggagtggaaggagcggttcggcattgacgtgaacaatctgcatatctgggaggatctcaagaagggctacatgagcaggtaccgggcgaagaaggttctcaacattatgaagaatgtgaaggagatcgaggagaagtacggcaggctcctggacaagatcgggcagctgattgacaacgatctcctgttcgagcgcatcaagagcattagggtgctcgacgagatccccgagtatgtgtacgatatttccgtggagggcacagagaacttcattgggggggagggcttcatttgcctgcataatacgtccctgggccaagtgacaatcgatggcgggacctacgacatctataggacgacacgcgtcaaccagccttccattgtggggacagccacgttcgatcagtactggagcgtgcgcacctctaagcggacttcaggaacagtgaccgtgaccgatcacttccgcgcctgggcgaaccggggcctgaacctcggcacaatagaccaaattacattgtgcgtggagggttaccaaagctctggatcagccaacatcacccagaacaccttctctcagggctcttcttccggcagttcgggtggctcatccggctccacaacgactactcgcatcgagtgtgagaacatgtccttgtccggaccctacgttagcaggatcaccaatccctttaatggtattgcgctgtacgccaacggagacacagcccgcgctaccgttaacttccccgcaagtcgcaactacaatttccgcctgcggggttgcggcaacaacaataatcttgcccgtgtggacctgaggatcgacggacggaccgtcgggaccttttattaccagggcacatacccctgggaggccccaattgacaatgtttatgtcagtgcggggagtcatacagtcgaaatcactgttactgcggataacggcacatgggacgtgtatgccgactacctggtgatacagtgactcgagggggggcccggtacccaattcgccctatagtgagtcgtattacaattcactggccgtcgttttacaacgtcgtgactgggaaaaccctggcgttacccaacttaatcgccttgcagcacatccccctttcgccagctggcgtaatagcgaagaggcccgcaccgatcgcccttcccaacagttgcgcagcctgaatggcgaatggaaattgtaagcgttaatattttgttaaaattcgcgttaaatttttgttaaatcagctcattttttaaccaataggccgaaatcggcaaaatcccttataaatcaaaagaatagaccgagatagggttgagtgttgttccagtttggaacaagagtccactattaaagaacgtggactccaacgtcaaagggcgaaaaaccgtctatcagggcgatggcccactacgtgaaccatcaccctaatcaagttttttggggtcgaggtgccgtaaagcactaaatcggaaccctaaagggagcccccgatttagagcttgacggggaaagccggcgaacgtggcgagaaaggaagggaagaaagcgaaaggagcgggcgctagggcgctggcaagtgtagcggtcacgctgcgcgtaaccaccacacccgccgcgcttaatgcgccgctacagggcgcgtcaggtg

SEQ ID NO: 3215 - DNA, 5186 bp, Artificial Sequence
  Synthetic Construct, AT-58 intein modified protein encoding nucleic acids in pBluescript
gcacttttcggggaaatgtgcgcggaacccctatttgtttatttttctaaatacattcaaatatgtatccgctcatgagacaataaccctgataaatgcttcaataatattgaaaaaggaagagtatgagtattcaacatttccgtgtcgcccttattcccttttttgcggcattttgccttcctgtttttgctcacccagaaacgctggtgaaagtaaaagatgctgaagatcagttgggtgcacgagtgggttacatcgaactggatctcaacagcggtaagatccttgagagttttcgccccgaagaacgttttccaatgatgagcacttttaaagttctgctatgtggcgcggtattatcccgtattgacgccgggcaagagcaactcggtcgccgcatacactattctcagaatgacttggttgagtactcaccagtcacagaaaagcatcttacggatggcatgacagtaagagaattatgcagtgctgccataaccatgagtgataacactgcggccaacttacttctgacaacgatcggaggaccgaaggagctaaccgcttttttgcacaacatgggggatcatgtaactcgccttgatcgttgggaaccggagctgaatgaagccataccaaacgacgagcgtgacaccacgatgcctgtagcaatggcaacaacgttgcgcaaactattaactggcgaactacttactctagcttcccggcaacaattaatagactggatggaggcggataaagttgcaggaccacttctgcgctcggcccttccggctggctggtttattgctgataaatctggagccggtgagcgtgggtctcgcggtatcattgcagcactggggccagatggtaagccctcccgtatcgtagttatctacacgacggggagtcaggcaactatggatgaacgaaatagacagatcgctgagataggtgcctcactgattaagcattggtaactgtcagaccaagtttactcatatatactttagattgatttaaaacttcatttttaatttaaaaggatctaggtgaagatcctttttgataatctcatgaccaaaatcccttaacgtgagttttcgttccactgagcgtcagaccccgtagaaaagatcaaaggatcttcttgagatcctttttttctgcgcgtaatctgctgcttgcaaacaaaaaaaccaccgctaccagcggtggtttgtttgccggatcaagagctaccaactctttttccgaaggtaactggcttcagcagagcgcagataccaaatactgtccttctagtgtagccgtagttaggccaccacttcaagaactctgtagcaccgcctacatacctcgctctgctaatcctgttaccagtggctgctgccagtggcgataagtcgtgtcttaccgggttggactcaagacgatagttaccggataaggcgcagcggtcgggctgaacggggggttcgtgcacacagcccagcttggagcgaacgacctacaccgaactgagatacctacagcgtgagctatgagaaagcgccacgcttcccgaagggagaaaggcggacaggtatccggtaagcggcagggtcggaacaggagagcgcacgagggagcttccagggggaaacgcctggtatctttatagtcctgtcgggtttcgccacctctgacttgagcgtcgatttttgtgatgctcgtcaggggggcggagcctatggaaaaacgccagcaacgcggcctttttacggttcctggccttttgctggccttttgctcacatgttctttcctgcgttatcccctgattctgtggataaccgtattaccgcctttgagtgagctgataccgctcgccgcagccgaacgaccgagcgcagcgagtcagtgagcgaggaagcggaagagcgcccaatacgcaaaccgcctctccccgcgcgttggccgattcattaatgcagctggcacgacaggtttcccgactggaaagcgggcagtgagcgcaacgcaattaatgtgagttagctcactcattaggcaccccaggctttacactttatgcttccggctcgtatgttgtgtggaattgtgagcggataacaatttcacacaggaaacagcatatgcaaacaagcattactctgacatccaacgcatccggtacgtttgacggttactattacgaactctggaaggatactggcaatacaacaatgacggtctacactcaaggtcgcttttcctgccagtggtcgaacatcaataacgcgttgtttaggaccgggaagaaatacaaccagaattggcagtctcttggcacaatccggatcacgtactctgcgacttacaacccaaacgggaactcctacttgtgtatctatggctggtctaccaacccattggtcgagttctacatcgttgagtcctgggggaactggagaccgcctggtgcctgcgtggacggggatactacagtgctgctggacggcaagctcatcaagatcaaggatctggaggacaagtggaaggacgtgaaggtcctcacatcggacgatctgaacccgaagctcacttccctgagcaagtactggaagctcaatgctgacgagtacgggaagaagatctacaagattaagaccgagctgggccgggagatcattgcgacggaggatcaccccttctacaccacgaacggccgcaagaggtgcggggagctcaaagtgggcgacgaggtcatcatctacccgaacgatttccccatgttcgaggacgataatagggttattgtggacgaggagaagatcaagaaggtcatcaacaacattggcgggacctacaagaacaagatcattaatgagctgaaggacaggaagctcatcccgctgacgtacaacgatcagaaggctagcattctcgcccggatcgttggccacgtgatgggcgacgggtctctcatcatcaacaacaagaactcccgcgtggtcttccgcggcgacattgaggatctcaagaccatcaaggaggacctcaaggagctgggctacgatggggaggagatcaagctgcatgagggggagaccgagatcacggactacaacggcaagaagcgcatcattaagggcaaggggtacagcttcgaggtgaggaagaagtcgctctgcatcctcctgaaggctctgggctgcgtcggcggggacaagacaaagaagatgtacggcattccaaactggatcaagactgcgcctaagtacatcaagaaggagttcctctcggcttacttcggctctgagctgacaactccgaagatccgcaaccacggcacctcattcaaggagctctccttcaagatcgcgaagattgaggagatcttcgacgaggataggttcattaaggacatcaaggagatgctcaaggagttcggcatcgagctgaaggtcagggttgaggaggggaacctccggaaggatggctacaagacaaaggtctacgtggcctccatctacaaccataaggagttcttcggccggatcgggtacacctacgcgaataagaaggagacgctggcccgctacgcgtacgagtacctcctgacgaaggagaagtacctcaaggaccgcaacatcaagaagctggagaacaatacaaagttcattactttcgataagttcatcaaggagaagtgcctgaagaatggcttcgttaaggagaagattgtcagcatcgaggagaccaaggtcgactacgtttacgatattactactatttcagagactcataacttcattgctaatggcttcctcacgggcaacacgtccctgggccaagtgacaatcgatggcgggacctacgacatctataggacgacacgcgtcaaccagccttccattgtggggacagccacgttcgatcagtactggagcgtgcgcacctctaagcggacttcaggaacagtgaccgtgaccgatcacttccgcgcctgggcgaaccggggcctgaacctcggcacaatagaccaaattacattgtgcgtggagggttaccaaagctctggatcagccaacatcacccagaacaccttctctcagggctcttcttccggcagttcgggtggctcatccggctccacaacgactactcgcatcgagtgtgagaacatgtccttgtccggaccctacgttagcaggatcaccaatccctttaatggtattgcgctgtacgccaacggagacacagcccgcgctaccgttaacttccccgcaagtcgcaactacaatttccgcctgcggggttgcggcaacaacaataatcttgcccgtgtggacctgaggatcgacggacggaccgtcgggaccttttattaccagggcacatacccctgggaggccccaattgacaatgtttatgtcagtgcggggagtcatacagtcgaaatcactgttactgcggataacggcacatgggacgtgtatgccgactacctggtgatacagtgactcgagggggggcccggtacccaattcgccctatagtgagtcgtattacaattcactggccgtcgttttacaacgtcgtgactgggaaaaccctggcgttacccaacttaatcgccttgcagcacatccccctttcgccagctggcgtaatagcgaagaggcccgcaccgatcgcccttcccaacagttgcgcagcctgaatggcgaatggaaattgtaagcgttaatattttgttaaaattcgcgttaaatttttgttaaatcagctcattttttaaccaataggccgaaatcggcaaaatcccttataaatcaaaagaatagaccgagatagggttgagtgttgttccagtttggaacaagagtccactattaaagaacgtggactccaacgtcaaagggcgaaaaaccgtctatcagggcgatggcccactacgtgaaccatcaccctaatcaagttttttggggtcgaggtgccgtaaagcactaaatcggaaccctaaagggagcccccgatttagagcttgacggggaaagccggcgaacgtggcgagaaaggaagggaagaaagcgaaaggagcgggcgctagggcgctggcaagtgtagcggtcacgctgcgcgtaaccaccacacccgccgcgcttaatgcgccgctacagggcgcgtcaggtg

SEQ ID NO: 3216 - DNA, 5243 bp, Artificial Sequence
  Synthetic Construct, AT-59 intein modified protein encoding nucleic acids in pBluescript
gcacttttcggggaaatgtgcgcggaacccctatttgtttatttttctaaatacattcaaatatgtatccgctcatgagacaataaccctgataaatgcttcaataatattgaaaaaggaagagtatgagtattcaacatttccgtgtcgcccttattcccttttttgcggcattttgccttcctgtttttgctcacccagaaacgctggtgaaagtaaaagatgctgaagatcagttgggtgcacgagtgggttacatcgaactggatctcaacagcggtaagatccttgagagttttcgccccgaagaacgttttccaatgatgagcacttttaaagttctgctatgtggcgcggtattatcccgtattgacgccgggcaagagcaactcggtcgccgcatacactattctcagaatgacttggttgagtactcaccagtcacagaaaagcatcttacggatggcatgacagtaagagaattatgcagtgctgccataaccatgagtgataacactgcggccaacttacttctgacaacgatcggaggaccgaaggagctaaccgcttttttgcacaacatgggggatcatgtaactcgccttgatcgttgggaaccggagctgaatgaagccataccaaacgacgagcgtgacaccacgatgcctgtagcaatggcaacaacgttgcgcaaactattaactggcgaactacttactctagcttcccggcaacaattaatagactggatggaggcggataaagttgcaggaccacttctgcgctcggcccttccggctggctggtttattgctgataaatctggagccggtgagcgtgggtctcgcggtatcattgcagcactggggccagatggtaagccctcccgtatcgtagttatctacacgacggggagtcaggcaactatggatgaacgaaatagacagatcgctgagataggtgcctcactgattaagcattggtaactgtcagaccaagtttactcatatatactttagattgatttaaaacttcatttttaatttaaaaggatctaggtgaagatcctttttgataatctcatgaccaaaatcccttaacgtgagttttcgttccactgagcgtcagaccccgtagaaaagatcaaaggatcttcttgagatcctttttttctgcgcgtaatctgctgcttgcaaacaaaaaaaccaccgctaccagcggtggtttgtttgccggatcaagagctaccaactctttttccgaaggtaactggcttcagcagagcgcagataccaaatactgtccttctagtgtagccgtagttaggccaccacttcaagaactctgtagcaccgcctacatacctcgctctgctaatcctgttaccagtggctgctgccagtggcgataagtcgtgtcttaccgggttggactcaagacgatagttaccggataaggcgcagcggtcgggctgaacggggggttcgtgcacacagcccagcttggagcgaacgacctacaccgaactgagatacctacagcgtgagctatgagaaagcgccacgcttcccgaagggagaaaggcggacaggtatccggtaagcggcagggtcggaacaggagagcgcacgagggagcttccagggggaaacgcctggtatctttatagtcctgtcgggtttcgccacctctgacttgagcgtcgatttttgtgatgctcgtcaggggggcggagcctatggaaaaacgccagcaacgcggcctttttacggttcctggccttttgctggccttttgctcacatgttctttcctgcgttatcccctgattctgtggataaccgtattaccgcctttgagtgagctgataccgctcgccgcagccgaacgaccgagcgcagcgagtcagtgagcgaggaagcggaagagcgcccaatacgcaaaccgcctctccccgcgcgttggccgattcattaatgcagctggcacgacaggtttcccgactggaaagcgggcagtgagcgcaacgcaattaatgtgagttagctcactcattaggcaccccaggctttacactttatgcttccggctcgtatgttgtgtggaattgtgagcggataacaatttcacacaggaaacagcatatgcaaacaagcattactctgacatccaacgcatccggtacgtttgacggttactattacgaactctggaaggatactggcaatacaacaatgacggtctacactcaaggtcgcttttcctgccagtggtcgaacatcaataacgcgttgtttaggaccgggaagaaatacaaccagaattggcagtctcttggcacaatccggatcacgtactctgcgacttacaacccaaacgggaactcctacttgtgtatctatggctggtctaccaacccattggtcgagttctacatcgttgagtcctgggggaactggagaccgcctggtgcctcgctgccatacgaggagaagattattattaaggagggggagttcattaagccagtggagatcgggaagctcgtggatgagatgattgagcgcttcggcttcgagaagatcgggaactctgaggtctgcgacctcccgatcgatatctacgccctctcactggaccaggatgagaaggtgcactggaagcggatcatttcgtgcatccgccacaagcataatggcaagctgatcaagattaagaccaagagcgggagggagattaccgcgacgccgtaccactcgttcgtcatccggaaggataacaagatcattcccgttaagggctccgagctcaagatcggggacaggattccggtggtcaagcatatccccgcgaattgcgttgaggctatcaacatttccgactacgtgagcggcaattacgttgtggataacatcaacaataagattgccccaaagatcaacggcaagtccattcctaacaatatcaagctcgactacgatttcggctacttcatcgggatctacctcgcggagggcagcgtcaccaagtacttcgttagcatctcgaatgtggacgagctcattctgaacaagatccgggccttcgcggacaagctcggcctgaactacggggagtacgataacaataacggcttcgcggagtcgcatgacatccgcatctactcctccaccctcgctgagttcctgtctaatttcggcacctcgtctaacacgaagaagatcgccgagttcgtgttcggggcgaacaaggagttcgtccggggcctcatcagggggtacttcgacggcgatgggaatgtcaacgccgacaggaaggtcattcgggttacatctaactcaaaggagctcatcgacggcatcgctattctcctggcccgcttcaatatcttcagcattaagacaaagactaagaaccagttcgtgctgatcattccccaccgctacgcgaagaagttccatgaggagatcaatttctcggtcgagaagaagaagtccgagctggagaggctggtgtcatccctgaacgacgataagacatacgactcaatcgatatgattccatccatcggcgatgctctcactaagctgggggagaaggtcgactaccctaaggttatcctcaagaagttcgagcggaagcagaagatcggcagggctaccctccagaggcacctgcgcaggatcgaggagctggctgtgaagaagggcgtcaacatcctcgccctgaaggagtactggctcctgaagaaggccgttgagtccgacgtgatctgggatgagattgtcaagatcgaggagattagctgcgacaagaagtatgtgtacgatatttctgtggaggggctggagactttcactactttcgatggggttctcactcataatacgtccctgggccaagtgacaatcgatggcgggacctacgacatctataggacgacacgcgtcaaccagccttccattgtggggacagccacgttcgatcagtactggagcgtgcgcacctctaagcggacttcaggaacagtgaccgtgaccgatcacttccgcgcctgggcgaaccggggcctgaacctcggcacaatagaccaaattacattgtgcgtggagggttaccaaagctctggatcagccaacatcacccagaacaccttctctcagggctcttcttccggcagttcgggtggctcatccggctccacaacgactactcgcatcgagtgtgagaacatgtccttgtccggaccctacgttagcaggatcaccaatccctttaatggtattgcgctgtacgccaacggagacacagcccgcgctaccgttaacttccccgcaagtcgcaactacaatttccgcctgcggggttgcggcaacaacaataatcttgcccgtgtggacctgaggatcgacggacggaccgtcgggaccttttattaccagggcacatacccctgggaggccccaattgacaatgtttatgtcagtgcggggagtcatacagtcgaaatcactgttactgcggataacggcacatgggacgtgtatgccgactacctggtgatacagtgactcgagggggggcccggtacccaattcgccctatagtgagtcgtattacaattcactggccgtcgttttacaacgtcgtgactgggaaaaccctggcgttacccaacttaatcgccttgcagcacatccccctttcgccagctggcgtaatagcgaagaggcccgcaccgatcgcccttcccaacagttgcgcagcctgaatggcgaatggaaattgtaagcgttaatattttgttaaaattcgcgttaaatttttgttaaatcagctcattttttaaccaataggccgaaatcggcaaaatcccttataaatcaaaagaatagaccgagatagggttgagtgttgttccagtttggaacaagagtccactattaaagaacgtggactccaacgtcaaagggcgaaaaaccgtctatcagggcgatggcccactacgtgaaccatcaccctaatcaagttttttggggtcgaggtgccgtaaagcactaaatcggaaccctaaagggagcccccgatttagagcttgacggggaaagccggcgaacgtggcgagaaaggaagggaagaaagcgaaaggagcgggcgctagggcgctggcaagtgtagcggtcacgctgcgcgtaaccaccacacccgccgcgcttaatgcgccgctacagggcgcgtcaggtg

SEQ ID NO: 3217 - DNA, 5294 bp, Artificial Sequence
  Synthetic Construct, AT-60 intein modified protein encoding nucleic acids in pBluescript
gcacttttcggggaaatgtgcgcggaacccctatttgtttatttttctaaatacattcaaatatgtatccgctcatgagacaataaccctgataaatgcttcaataatattgaaaaaggaagagtatgagtattcaacatttccgtgtcgcccttattcccttttttgcggcattttgccttcctgtttttgctcacccagaaacgctggtgaaagtaaaagatgctgaagatcagttgggtgcacgagtgggttacatcgaactggatctcaacagcggtaagatccttgagagttttcgccccgaagaacgttttccaatgatgagcacttttaaagttctgctatgtggcgcggtattatcccgtattgacgccgggcaagagcaactcggtcgccgcatacactattctcagaatgacttggttgagtactcaccagtcacagaaaagcatcttacggatggcatgacagtaagagaattatgcagtgctgccataaccatgagtgataacactgcggccaacttacttctgacaacgatcggaggaccgaaggagctaaccgcttttttgcacaacatgggggatcatgtaactcgccttgatcgttgggaaccggagctgaatgaagccataccaaacgacgagcgtgacaccacgatgcctgtagcaatggcaacaacgttgcgcaaactattaactggcgaactacttactctagcttcccggcaacaattaatagactggatggaggcggataaagttgcaggaccacttctgcgctcggcccttccggctggctggtttattgctgataaatctggagccggtgagcgtgggtctcgcggtatcattgcagcactggggccagatggtaagccctcccgtatcgtagttatctacacgacggggagtcaggcaactatggatgaacgaaatagacagatcgctgagataggtgcctcactgattaagcattggtaactgtcagaccaagtttactcatatatactttagattgatttaaaacttcatttttaatttaaaaggatctaggtgaagatcctttttgataatctcatgaccaaaatcccttaacgtgagttttcgttccactgagcgtcagaccccgtagaaaagatcaaaggatcttcttgagatcctttttttctgcgcgtaatctgctgcttgcaaacaaaaaaaccaccgctaccagcggtggtttgtttgccggatcaagagctaccaactctttttccgaaggtaactggcttcagcagagcgcagataccaaatactgtccttctagtgtagccgtagttaggccaccacttcaagaactctgtagcaccgcctacatacctcgctctgctaatcctgttaccagtggctgctgccagtggcgataagtcgtgtcttaccgggttggactcaagacgatagttaccggataaggcgcagcggtcgggctgaacggggggttcgtgcacacagcccagcttggagcgaacgacctacaccgaactgagatacctacagcgtgagctatgagaaagcgccacgcttcccgaagggagaaaggcggacaggtatccggtaagcggcagggtcggaacaggagagcgcacgagggagcttccagggggaaacgcctggtatctttatagtcctgtcgggtttcgccacctctgacttgagcgtcgatttttgtgatgctcgtcaggggggcggagcctatggaaaaacgccagcaacgcggcctttttacggttcctggccttttgctggccttttgctcacatgttctttcctgcgttatcccctgattctgtggataaccgtattaccgcctttgagtgagctgataccgctcgccgcagccgaacgaccgagcgcagcgagtcagtgagcgaggaagcggaagagcgcccaatacgcaaaccgcctctccccgcgcgttggccgattcattaatgcagctggcacgacaggtttcccgactggaaagcgggcagtgagcgcaacgcaattaatgtgagttagctcactcattaggcaccccaggctttacactttatgcttccggctcgtatgttgtgtggaattgtgagcggataacaatttcacacaggaaacagcatatgcaaacaagcattactctgacatccaacgcatccggtacgtttgacggttactattacgaactctggaaggatactggcaatacaacaatgacggtctacactcaaggtcgcttttcctgccagtggtcgaacatcaataacgcgttgtttaggaccgggaagaaatacaaccagaattggcagtctcttggcacaatccggatcacgtactctgcgacttacaacccaaacgggaactcctacttgtgtatctatggctggtctaccaacccattggtcgagttctacatcgttgagtcctgggggaactggagaccgcctggtgcctgcctgacatcaaattcaaagatcctgacagacgatggctactacattaagctggagaagctcaaggagaagctggacctgcatattaagatctacaacaccgaggagggcgagaagtccagcaatattctgttcgtgtcggagcgctacgcggatgagaagatcattcggatcaagaccgagtcggggagggtcctggagggctctaaggaccacccggtgctgacgctcaacggctacgtgcccatgggcatgctcaaggagggggacgatgtgatcgtctacccatacgagggcgtggagtacgaggagccttccgacgagatcattctcgatgaggacgatttcgcggagtacgacaagcagatcattaagtacctgaaggataggggcctcctgccgctccggatggacaacaagaatatcggcatcattgctaggctcctggggttcgccttcggcgatgggagcatcgtgaaggagaacggcgacagggagaggctctacgtggccttctacgggaagagggagaccctcatcaagattcgggaggacctggagaagctcggcatcaaggccagccgcatctactcccgcaagcgcgaggtcgagatcaggaacgcgtacggcgacgagtacacatccctgtgcgaggataattctatcaagattacttcaaaggccttcgcgctgttcatgcataagctcgggatgcccatcggcaagaagacggagcagatctacaagattccagagtggatcaagaaggcccctaagtgggttaagcggaacttcctggctggcctcttcggggctgacggctctcgcgcggtcttcaagaactacaccccgctgcccatcaatctcacgatgtcgaagtctgaggagctcaaggagaacatcctggagttcctcaatgagattaagctcctgctcgctgagttcgatatcgagtcaatgatctacgagattaagtccctggacggccgcgttagctacaggctcgccatcgtgggcgaggagtcaattaagaacttcctggggcgcatcaattacgagtactccggcgagaagaaggtcatcgggctgctcgcgtacgagtacctccgcaggaaggacatcgctaaggagattcgcaagaagtgcatcaagagggcgaaggagctgtacaagaagggcgttacagtgagcgagatgctcaagatggatgagttcaggaacgagttcatctcgaagcggctgattgagcgcgctgtctacgagaatctcgacgaggacgatgttcggatctccactaagttcccgaagttcgaggagttcatcgagaagtacggcgtcattggcgggttcgttatcgataagattaaggagatcgaggagatttcatacgactccaagctgtacgacgtgggcatcgtttcaaaggagcataacttcattgctaacagcatcgtggttcataatacgtccctgggccaagtgacaatcgatggcgggacctacgacatctataggacgacacgcgtcaaccagccttccattgtggggacagccacgttcgatcagtactggagcgtgcgcacctctaagcggacttcaggaacagtgaccgtgaccgatcacttccgcgcctgggcgaaccggggcctgaacctcggcacaatagaccaaattacattgtgcgtggagggttaccaaagctctggatcagccaacatcacccagaacaccttctctcagggctcttcttccggcagttcgggtggctcatccggctccacaacgactactcgcatcgagtgtgagaacatgtccttgtccggaccctacgttagcaggatcaccaatccctttaatggtattgcgctgtacgccaacggagacacagcccgcgctaccgttaacttccccgcaagtcgcaactacaatttccgcctgcggggttgcggcaacaacaataatcttgcccgtgtggacctgaggatcgacggacggaccgtcgggaccttttattaccagggcacatacccctgggaggccccaattgacaatgtttatgtcagtgcggggagtcatacagtcgaaatcactgttactgcggataacggcacatgggacgtgtatgccgactacctggtgatacagtgactcgagggggggcccggtacccaattcgccctatagtgagtcgtattacaattcactggccgtcgttttacaacgtcgtgactgggaaaaccctggcgttacccaacttaatcgccttgcagcacatccccctttcgccagctggcgtaatagcgaagaggcccgcaccgatcgcccttcccaacagttgcgcagcctgaatggcgaatggaaattgtaagcgttaatattttgttaaaattcgcgttaaatttttgttaaatcagctcattttttaaccaataggccgaaatcggcaaaatcccttataaatcaaaagaatagaccgagatagggttgagtgttgttccagtttggaacaagagtccactattaaagaacgtggactccaacgtcaaagggcgaaaaaccgtctatcagggcgatggcccactacgtgaaccatcaccctaatcaagttttttggggtcgaggtgccgtaaagcactaaatcggaaccctaaagggagcccccgatttagagcttgacggggaaagccggcgaacgtggcgagaaaggaagggaagaaagcgaaaggagcgggcgctagggcgctggcaagtgtagcggtcacgctgcgcgtaaccaccacacccgccgcgcttaatgcgccgctacagggcgcgtcaggtg

SEQ ID NO: 3218 - DNA, 4835 bp, Artificial Sequence
  Synthetic Construct, AT-61 intein modified protein encoding nucleic acids in pBluescript
gcacttttcggggaaatgtgcgcggaacccctatttgtttatttttctaaatacattcaaatatgtatccgctcatgagacaataaccctgataaatgcttcaataatattgaaaaaggaagagtatgagtattcaacatttccgtgtcgcccttattcccttttttgcggcattttgccttcctgtttttgctcacccagaaacgctggtgaaagtaaaagatgctgaagatcagttgggtgcacgagtgggttacatcgaactggatctcaacagcggtaagatccttgagagttttcgccccgaagaacgttttccaatgatgagcacttttaaagttctgctatgtggcgcggtattatcccgtattgacgccgggcaagagcaactcggtcgccgcatacactattctcagaatgacttggttgagtactcaccagtcacagaaaagcatcttacggatggcatgacagtaagagaattatgcagtgctgccataaccatgagtgataacactgcggccaacttacttctgacaacgatcggaggaccgaaggagctaaccgcttttttgcacaacatgggggatcatgtaactcgccttgatcgttgggaaccggagctgaatgaagccataccaaacgacgagcgtgacaccacgatgcctgtagcaatggcaacaacgttgcgcaaactattaactggcgaactacttactctagcttcccggcaacaattaatagactggatggaggcggataaagttgcaggaccacttctgcgctcggcccttccggctggctggtttattgctgataaatctggagccggtgagcgtgggtctcgcggtatcattgcagcactggggccagatggtaagccctcccgtatcgtagttatctacacgacggggagtcaggcaactatggatgaacgaaatagacagatcgctgagataggtgcctcactgattaagcattggtaactgtcagaccaagtttactcatatatactttagattgatttaaaacttcatttttaatttaaaaggatctaggtgaagatcctttttgataatctcatgaccaaaatcccttaacgtgagttttcgttccactgagcgtcagaccccgtagaaaagatcaaaggatcttcttgagatcctttttttctgcgcgtaatctgctgcttgcaaacaaaaaaaccaccgctaccagcggtggtttgtttgccggatcaagagctaccaactctttttccgaaggtaactggcttcagcagagcgcagataccaaatactgtccttctagtgtagccgtagttaggccaccacttcaagaactctgtagcaccgcctacatacctcgctctgctaatcctgttaccagtggctgctgccagtggcgataagtcgtgtcttaccgggttggactcaagacgatagttaccggataaggcgcagcggtcgggctgaacggggggttcgtgcacacagcccagcttggagcgaacgacctacaccgaactgagatacctacagcgtgagctatgagaaagcgccacgcttcccgaagggagaaaggcggacaggtatccggtaagcggcagggtcggaacaggagagcgcacgagggagcttccagggggaaacgcctggtatctttatagtcctgtcgggtttcgccacctctgacttgagcgtcgatttttgtgatgctcgtcaggggggcggagcctatggaaaaacgccagcaacgcggcctttttacggttcctggccttttgctggccttttgctcacatgttctttcctgcgttatcccctgattctgtggataaccgtattaccgcctttgagtgagctgataccgctcgccgcagccgaacgaccgagcgcagcgagtcagtgagcgaggaagcggaagagcgcccaatacgcaaaccgcctctccccgcgcgttggccgattcattaatgcagctggcacgacaggtttcccgactggaaagcgggcagtgagcgcaacgcaattaatgtgagttagctcactcattaggcaccccaggctttacactttatgcttccggctcgtatgttgtgtggaattgtgagcggataacaatttcacacaggaaacagcatatgcaaacaagcattactctgacatccaacgcatccggtacgtttgacggttactattacgaactctggaaggatactggcaatacaacaatgacggtctacactcaaggtcgcttttcctgccagtggtcgaacatcaataacgcgttgtttaggaccgggaagaaatacaaccagaattggcagtctcttggcacaatccggatcacgtactctgcgacttacaacccaaacgggaactcctacttgtgtatctatggctggtctaccaacccattggtcgagttctacatcgttgagtcctgggggaactggagaccgcctggtgcctcggtggactacaatgagcctattattattaaggagaatggggagattaaggtcgtgaagatcggggagctgattgacaagattattgagaactccgagaatatccgcagggagggcatcctggagattgccaagtgcaaggggatcgaggttattgcgttcaactcgaattacaagttcaagttcatgccagtttcggaggtgtctaggcaccctgtgtctgagatgttcgagatcgtggtcgagggcaacaagaaggtcagggttacacggtcccatagcgtcttcactatccgggacaatgaggttgtgccgatccgcgtggacgagctgaaggtcggggatatcctggttctcgcgaaggagctccccaacatcgaggaggacatcgagattgataagaagttctcaaagatcctgggctacatcattgctgaggggtactacgacgataagaagatcgtgctctcttacgactacaacgagaaggagttcatcaatgagaccattgattacttcaagtcactgaactccgacatcacgatctacagcaaggatctcaatatccagattgaggtgaagaacaagaagatcattaatctcctgaagaagctgcgcgtcaagaacaagaggatcccgagcatcattttcaagtcgccctacgagatcaagaagtctttcatcgacggcattttcaacgggaaggatgctaaggtgttcgtctcaaaggagctcgccgaggacgtgatcttcctcctgctccagattaaggagaacgccacaatcaataagaagtcgatcaacgatattgaggtctacgaggttcggcgcatcaccaacatctacacgaatcggaagctggagaagctcatcaactccgacttcattttcctcaagatcaaggagattaataaggtcgagccgacgagcggctacgcgtacgacctcactgttccaaatgcggagaatttcgttgctggcttcgggggcttcgtgctccacaatacgtccctgggccaagtgacaatcgatggcgggacctacgacatctataggacgacacgcgtcaaccagccttccattgtggggacagccacgttcgatcagtactggagcgtgcgcacctctaagcggacttcaggaacagtgaccgtgaccgatcacttccgcgcctgggcgaaccggggcctgaacctcggcacaatagaccaaattacattgtgcgtggagggttaccaaagctctggatcagccaacatcacccagaacaccttctctcagggctcttcttccggcagttcgggtggctcatccggctccacaacgactactcgcatcgagtgtgagaacatgtccttgtccggaccctacgttagcaggatcaccaatccctttaatggtattgcgctgtacgccaacggagacacagcccgcgctaccgttaacttccccgcaagtcgcaactacaatttccgcctgcggggttgcggcaacaacaataatcttgcccgtgtggacctgaggatcgacggacggaccgtcgggaccttttattaccagggcacatacccctgggaggccccaattgacaatgtttatgtcagtgcggggagtcatacagtcgaaatcactgttactgcggataacggcacatgggacgtgtatgccgactacctggtgatacagtgactcgagggggggcccggtacccaattcgccctatagtgagtcgtattacaattcactggccgtcgttttacaacgtcgtgactgggaaaaccctggcgttacccaacttaatcgccttgcagcacatccccctttcgccagctggcgtaatagcgaagaggcccgcaccgatcgcccttcccaacagttgcgcagcctgaatggcgaatggaaattgtaagcgttaatattttgttaaaattcgcgttaaatttttgttaaatcagctcattttttaaccaataggccgaaatcggcaaaatcccttataaatcaaaagaatagaccgagatagggttgagtgttgttccagtttggaacaagagtccactattaaagaacgtggactccaacgtcaaagggcgaaaaaccgtctatcagggcgatggcccactacgtgaaccatcaccctaatcaagttttttggggtcgaggtgccgtaaagcactaaatcggaaccctaaagggagcccccgatttagagcttgacggggaaagccggcgaacgtggcgagaaaggaagggaagaaagcgaaaggagcgggcgctagggcgctggcaagtgtagcggtcacgctgcgcgtaaccaccacacccgccgcgcttaatgcgccgctacagggcgcgtcaggtg

SEQ ID NO: 3219 - DNA, 5192 bp, Artificial Sequence
  Synthetic Construct, AT-62 intein modified protein encoding nucleic acids in pBluescript
gcacttttcggggaaatgtgcgcggaacccctatttgtttatttttctaaatacattcaaatatgtatccgctcatgagacaataaccctgataaatgcttcaataatattgaaaaaggaagagtatgagtattcaacatttccgtgtcgcccttattcccttttttgcggcattttgccttcctgtttttgctcacccagaaacgctggtgaaagtaaaagatgctgaagatcagttgggtgcacgagtgggttacatcgaactggatctcaacagcggtaagatccttgagagttttcgccccgaagaacgttttccaatgatgagcacttttaaagttctgctatgtggcgcggtattatcccgtattgacgccgggcaagagcaactcggtcgccgcatacactattctcagaatgacttggttgagtactcaccagtcacagaaaagcatcttacggatggcatgacagtaagagaattatgcagtgctgccataaccatgagtgataacactgcggccaacttacttctgacaacgatcggaggaccgaaggagctaaccgcttttttgcacaacatgggggatcatgtaactcgccttgatcgttgggaaccggagctgaatgaagccataccaaacgacgagcgtgacaccacgatgcctgtagcaatggcaacaacgttgcgcaaactattaactggcgaactacttactctagcttcccggcaacaattaatagactggatggaggcggataaagttgcaggaccacttctgcgctcggcccttccggctggctggtttattgctgataaatctggagccggtgagcgtgggtctcgcggtatcattgcagcactggggccagatggtaagccctcccgtatcgtagttatctacacgacggggagtcaggcaactatggatgaacgaaatagacagatcgctgagataggtgcctcactgattaagcattggtaactgtcagaccaagtttactcatatatactttagattgatttaaaacttcatttttaatttaaaaggatctaggtgaagatcctttttgataatctcatgaccaaaatcccttaacgtgagttttcgttccactgagcgtcagaccccgtagaaaagatcaaaggatcttcttgagatcctttttttctgcgcgtaatctgctgcttgcaaacaaaaaaaccaccgctaccagcggtggtttgtttgccggatcaagagctaccaactctttttccgaaggtaactggcttcagcagagcgcagataccaaatactgtccttctagtgtagccgtagttaggccaccacttcaagaactctgtagcaccgcctacatacctcgctctgctaatcctgttaccagtggctgctgccagtggcgataagtcgtgtcttaccgggttggactcaagacgatagttaccggataaggcgcagcggtcgggctgaacggggggttcgtgcacacagcccagcttggagcgaacgacctacaccgaactgagatacctacagcgtgagctatgagaaagcgccacgcttcccgaagggagaaaggcggacaggtatccggtaagcggcagggtcggaacaggagagcgcacgagggagcttccagggggaaacgcctggtatctttatagtcctgtcgggtttcgccacctctgacttgagcgtcgatttttgtgatgctcgtcaggggggcggagcctatggaaaaacgccagcaacgcggcctttttacggttcctggccttttgctggccttttgctcacatgttctttcctgcgttatcccctgattctgtggataaccgtattaccgcctttgagtgagctgataccgctcgccgcagccgaacgaccgagcgcagcgagtcagtgagcgaggaagcggaagagcgcccaatacgcaaaccgcctctccccgcgcgttggccgattcattaatgcagctggcacgacaggtttcccgactggaaagcgggcagtgagcgcaacgcaattaatgtgagttagctcactcattaggcaccccaggctttacactttatgcttccggctcgtatgttgtgtggaattgtgagcggataacaatttcacacaggaaacagcatatgcaaacaagcattactctgacatccaacgcatccggtacgtttgacggttactattacgaactctggaaggatactggcaatacaacaatgacggtctacactcaaggtcgcttttcctgccagtggtcgaacatcaataacgcgttgtttaggaccgggaagaaatacaaccagaattggcagtctcttggcacaatccggatcacgtactctgcgacttacaacccaaacgggaactcctacttgtgtatctatggctggtctaccaacccattggtcgagttctacatcgttgagtcctgggggaactggagaccgcctggtgcctgcttccatccggatgaggttctcttcattgatcgggggcgggggctggagtgcattactttcaaggagctgttcgagctggaggacaaggacaacgtgaagatcctctccttcgatggcgagaagctcagcctgaagaagctcaagctggcctccaagcgctactacaatgacgatctcatcaccctgcggttcaacctcggccgcgagatcaagattacgaaggaccacccagtggtcattctggaggatggcgagctcaagatcaagctgacatctgacgtgaaggagggggataaggtcatcctgccctacggcaacttcggggaggagagggagatcgagattgacatcctggaggagctgagcaagacagatctcattgagaaagtgtggatccacaacaaggacctggcgactaatgagttcaacatcattaagccatacctctcgaataagtaccctcatgacgtcaagaggaacggcaccatccgggctaaggacattctcccgatcaaggagattctggataagtacgggtccaagaaccggctgttcacggcgaagtcgaagtctaccacgatcccctacaagattaagatcgacaaggatttcgctcggctcattggctactacctgagcgaggggtggatctcgaaggactacggccgcaacggggttgtgcgcaagaggattggcctctgcttcgggatccacgaggaggagtacattaacgacgttaagaatatcctcaacaagctgggcatcaagtacattgagaagatcaaggatgggtcacattccattctcatctccagcaagatcctggcttacgtcttcgagaatattctgaactgcggcatcaactgctacaataagaacatcccgccccagatgttcaatgccaaggaggagatcaagtgggagttcctcaagggcctgttccgcggggacggcgggatcgtcaggctcaacaataacaagaatctgaacatcgagttcgccaccgtttctaagaagatggcgcactcactcctgattctcctgcagctcctgggcatcgtcgcttcggttaagaagtgctacaataacaagtctacaactatggcctacatcattaggattaacggcctggagcaggtcaagaagatcggcgagctgttcgggaagaagtgggagaattacaaggacattgccgagtcatacaagcggaacatcgagccgctcggctacaagaagtccgataatttcgcgatcctggaggttaaggagatcattaaggagcattactccggctacgtgtactcagtggagacagagaactcactgctcattacaagctacggcatcctcattcacaacacgtccctgggccaagtgacaatcgatggcgggacctacgacatctataggacgacacgcgtcaaccagccttccattgtggggacagccacgttcgatcagtactggagcgtgcgcacctctaagcggacttcaggaacagtgaccgtgaccgatcacttccgcgcctgggcgaaccggggcctgaacctcggcacaatagaccaaattacattgtgcgtggagggttaccaaagctctggatcagccaacatcacccagaacaccttctctcagggctcttcttccggcagttcgggtggctcatccggctccacaacgactactcgcatcgagtgtgagaacatgtccttgtccggaccctacgttagcaggatcaccaatccctttaatggtattgcgctgtacgccaacggagacacagcccgcgctaccgttaacttccccgcaagtcgcaactacaatttccgcctgcggggttgcggcaacaacaataatcttgcccgtgtggacctgaggatcgacggacggaccgtcgggaccttttattaccagggcacatacccctgggaggccccaattgacaatgtttatgtcagtgcggggagtcatacagtcgaaatcactgttactgcggataacggcacatgggacgtgtatgccgactacctggtgatacagtgactcgagggggggcccggtacccaattcgccctatagtgagtcgtattacaattcactggccgtcgttttacaacgtcgtgactgggaaaaccctggcgttacccaacttaatcgccttgcagcacatccccctttcgccagctggcgtaatagcgaagaggcccgcaccgatcgcccttcccaacagttgcgcagcctgaatggcgaatggaaattgtaagcgttaatattttgttaaaattcgcgttaaatttttgttaaatcagctcattttttaaccaataggccgaaatcggcaaaatcccttataaatcaaaagaatagaccgagatagggttgagtgttgttccagtttggaacaagagtccactattaaagaacgtggactccaacgtcaaagggcgaaaaaccgtctatcagggcgatggcccactacgtgaaccatcaccctaatcaagttttttggggtcgaggtgccgtaaagcactaaatcggaaccctaaagggagcccccgatttagagcttgacggggaaagccggcgaacgtggcgagaaaggaagggaagaaagcgaaaggagcgggcgctagggcgctggcaagtgtagcggtcacgctgcgcgtaaccaccacacccgccgcgcttaatgcgccgctacagggcgcgtcaggtg

SEQ ID NO: 3220 - DNA, 5012 bp, Artificial Sequence
  Synthetic Construct, AT-63 intein modified protein encoding nucleic acids in pBluescript
gcacttttcggggaaatgtgcgcggaacccctatttgtttatttttctaaatacattcaaatatgtatccgctcatgagacaataaccctgataaatgcttcaataatattgaaaaaggaagagtatgagtattcaacatttccgtgtcgcccttattcccttttttgcggcattttgccttcctgtttttgctcacccagaaacgctggtgaaagtaaaagatgctgaagatcagttgggtgcacgagtgggttacatcgaactggatctcaacagcggtaagatccttgagagttttcgccccgaagaacgttttccaatgatgagcacttttaaagttctgctatgtggcgcggtattatcccgtattgacgccgggcaagagcaactcggtcgccgcatacactattctcagaatgacttggttgagtactcaccagtcacagaaaagcatcttacggatggcatgacagtaagagaattatgcagtgctgccataaccatgagtgataacactgcggccaacttacttctgacaacgatcggaggaccgaaggagctaaccgcttttttgcacaacatgggggatcatgtaactcgccttgatcgttgggaaccggagctgaatgaagccataccaaacgacgagcgtgacaccacgatgcctgtagcaatggcaacaacgttgcgcaaactattaactggcgaactacttactctagcttcccggcaacaattaatagactggatggaggcggataaagttgcaggaccacttctgcgctcggcccttccggctggctggtttattgctgataaatctggagccggtgagcgtgggtctcgcggtatcattgcagcactggggccagatggtaagccctcccgtatcgtagttatctacacgacggggagtcaggcaactatggatgaacgaaatagacagatcgctgagataggtgcctcactgattaagcattggtaactgtcagaccaagtttactcatatatactttagattgatttaaaacttcatttttaatttaaaaggatctaggtgaagatcctttttgataatctcatgaccaaaatcccttaacgtgagttttcgttccactgagcgtcagaccccgtagaaaagatcaaaggatcttcttgagatcctttttttctgcgcgtaatctgctgcttgcaaacaaaaaaaccaccgctaccagcggtggtttgtttgccggatcaagagctaccaactctttttccgaaggtaactggcttcagcagagcgcagataccaaatactgtccttctagtgtagccgtagttaggccaccacttcaagaactctgtagcaccgcctacatacctcgctctgctaatcctgttaccagtggctgctgccagtggcgataagtcgtgtcttaccgggttggactcaagacgatagttaccggataaggcgcagcggtcgggctgaacggggggttcgtgcacacagcccagcttggagcgaacgacctacaccgaactgagatacctacagcgtgagctatgagaaagcgccacgcttcccgaagggagaaaggcggacaggtatccggtaagcggcagggtcggaacaggagagcgcacgagggagcttccagggggaaacgcctggtatctttatagtcctgtcgggtttcgccacctctgacttgagcgtcgatttttgtgatgctcgtcaggggggcggagcctatggaaaaacgccagcaacgcggcctttttacggttcctggccttttgctggccttttgctcacatgttctttcctgcgttatcccctgattctgtggataaccgtattaccgcctttgagtgagctgataccgctcgccgcagccgaacgaccgagcgcagcgagtcagtgagcgaggaagcggaagagcgcccaatacgcaaaccgcctctccccgcgcgttggccgattcattaatgcagctggcacgacaggtttcccgactggaaagcgggcagtgagcgcaacgcaattaatgtgagttagctcactcattaggcaccccaggctttacactttatgcttccggctcgtatgttgtgtggaattgtgagcggataacaatttcacacaggaaacagcatatgcaaacaagcattactctgacatccaacgcatccggtacgtttgacggttactattacgaactctggaaggatactggcaatacaacaatgacggtctacactcaaggtcgcttttcctgccagtggtcgaacatcaataacgcgttgtttaggaccgggaagaaatacaaccagaattggcagtctcttggcacaatccggatcacgtactctgcgacttacaacccaaacgggaactcctacttgtgtatctatggctggtctaccaacccattggtcgagttctacatcgttgagtcctgggggaactggagaccgcctggtgcctctattccgggggatgaggtcgtttgggccaaggtggacggggaggccaagctcattcctattgaggatctctacgagctctggaaggagggcagggatgttgaggtggctgctctcacggaggagggggtggtctggtccagcgtcgacagggttgctaggcacaggaggcggacaggcctggtgaagatcattacaaggactgggcgggaggtcatcgttacagaggaccattccgtgttcactgtccgggacggcaagattgtggatgtcccaacctcagagctctccgagggcgattggatcgtcctcccagctaggctgccagctggcgactcagatgagattgacgggatcaagattgacgaggatctcgcgttcctcctgggcctctacgtggctgaggggtccctgaccaaccagaaggacgctgtcaggatccacaataaggatcctgaggtcatcgaggagattgaccgcatcgttagggagaagggctgggaggggcggtactacgagagcgaccattcgtactggatcaagagccggaagctccgccagctgtgcgagaagctcggcactaaggccagggagaagaggctcgggccactcctgtcgctgaagcctgagctcctggctgctgctctgaggggctactacacgggcgacgggtcgttctctgtgaagccgcacggccgctctgccatcattgaggcgaccacggtctcaaagaggctcgctgatgagctcctggtggccctccagattctggacatcgtcgcgcgccgctacgagtgcgacgataccaagggctcgacgcggtaccgcgtgatgattaccaagtctgagtacatccgcacgttcgttgagaaagtgggcttcgcccagtccgagaagaacgagaggatccggaagttcctcgcggagaggaagtggacacgcggcaggtccgatattccgactgagctgatcgggagcccctacacctacgttgaggtggagtacatctctgacagggtggctgctgatggcgggctcatgaaggccgagctggagcatctgtacttcgacaagattaaggagatcgttcccctggatcgcgacgatgagtatgtgtacgacgtcgtggaggttaagctcgggcataatttcgttggggggcagggggttctgctccacaacacgtccctgggccaagtgacaatcgatggcgggacctacgacatctataggacgacacgcgtcaaccagccttccattgtggggacagccacgttcgatcagtactggagcgtgcgcacctctaagcggacttcaggaacagtgaccgtgaccgatcacttccgcgcctgggcgaaccggggcctgaacctcggcacaatagaccaaattacattgtgcgtggagggttaccaaagctctggatcagccaacatcacccagaacaccttctctcagggctcttcttccggcagttcgggtggctcatccggctccacaacgactactcgcatcgagtgtgagaacatgtccttgtccggaccctacgttagcaggatcaccaatccctttaatggtattgcgctgtacgccaacggagacacagcccgcgctaccgttaacttccccgcaagtcgcaactacaatttccgcctgcggggttgcggcaacaacaataatcttgcccgtgtggacctgaggatcgacggacggaccgtcgggaccttttattaccagggcacatacccctgggaggccccaattgacaatgtttatgtcagtgcggggagtcatacagtcgaaatcactgttactgcggataacggcacatgggacgtgtatgccgactacctggtgatacagtgactcgagggggggcccggtacccaattcgccctatagtgagtcgtattacaattcactggccgtcgttttacaacgtcgtgactgggaaaaccctggcgttacccaacttaatcgccttgcagcacatccccctttcgccagctggcgtaatagcgaagaggcccgcaccgatcgcccttcccaacagttgcgcagcctgaatggcgaatggaaattgtaagcgttaatattttgttaaaattcgcgttaaatttttgttaaatcagctcattttttaaccaataggccgaaatcggcaaaatcccttataaatcaaaagaatagaccgagatagggttgagtgttgttccagtttggaacaagagtccactattaaagaacgtggactccaacgtcaaagggcgaaaaaccgtctatcagggcgatggcccactacgtgaaccatcaccctaatcaagttttttggggtcgaggtgccgtaaagcactaaatcggaaccctaaagggagcccccgatttagagcttgacggggaaagccggcgaacgtggcgagaaaggaagggaagaaagcgaaaggagcgggcgctagggcgctggcaagtgtagcggtcacgctgcgcgtaaccaccacacccgccgcgcttaatgcgccgctacagggcgcgtcaggtg

SEQ ID NO: 3221 - DNA, 5396 bp, Artificial Sequence
  Synthetic Construct, AT-64 intein modified protein encoding nucleic acids in pBluescript
gcacttttcggggaaatgtgcgcggaacccctatttgtttatttttctaaatacattcaaatatgtatccgctcatgagacaataaccctgataaatgcttcaataatattgaaaaaggaagagtatgagtattcaacatttccgtgtcgcccttattcccttttttgcggcattttgccttcctgtttttgctcacccagaaacgctggtgaaagtaaaagatgctgaagatcagttgggtgcacgagtgggttacatcgaactggatctcaacagcggtaagatccttgagagttttcgccccgaagaacgttttccaatgatgagcacttttaaagttctgctatgtggcgcggtattatcccgtattgacgccgggcaagagcaactcggtcgccgcatacactattctcagaatgacttggttgagtactcaccagtcacagaaaagcatcttacggatggcatgacagtaagagaattatgcagtgctgccataaccatgagtgataacactgcggccaacttacttctgacaacgatcggaggaccgaaggagctaaccgcttttttgcacaacatgggggatcatgtaactcgccttgatcgttgggaaccggagctgaatgaagccataccaaacgacgagcgtgacaccacgatgcctgtagcaatggcaacaacgttgcgcaaactattaactggcgaactacttactctagcttcccggcaacaattaatagactggatggaggcggataaagttgcaggaccacttctgcgctcggcccttccggctggctggtttattgctgataaatctggagccggtgagcgtgggtctcgcggtatcattgcagcactggggccagatggtaagccctcccgtatcgtagttatctacacgacggggagtcaggcaactatggatgaacgaaatagacagatcgctgagataggtgcctcactgattaagcattggtaactgtcagaccaagtttactcatatatactttagattgatttaaaacttcatttttaatttaaaaggatctaggtgaagatcctttttgataatctcatgaccaaaatcccttaacgtgagttttcgttccactgagcgtcagaccccgtagaaaagatcaaaggatcttcttgagatcctttttttctgcgcgtaatctgctgcttgcaaacaaaaaaaccaccgctaccagcggtggtttgtttgccggatcaagagctaccaactctttttccgaaggtaactggcttcagcagagcgcagataccaaatactgtccttctagtgtagccgtagttaggccaccacttcaagaactctgtagcaccgcctacatacctcgctctgctaatcctgttaccagtggctgctgccagtggcgataagtcgtgtcttaccgggttggactcaagacgatagttaccggataaggcgcagcggtcgggctgaacggggggttcgtgcacacagcccagcttggagcgaacgacctacaccgaactgagatacctacagcgtgagctatgagaaagcgccacgcttcccgaagggagaaaggcggacaggtatccggtaagcggcagggtcggaacaggagagcgcacgagggagcttccagggggaaacgcctggtatctttatagtcctgtcgggtttcgccacctctgacttgagcgtcgatttttgtgatgctcgtcaggggggcggagcctatggaaaaacgccagcaacgcggcctttttacggttcctggccttttgctggccttttgctcacatgttctttcctgcgttatcccctgattctgtggataaccgtattaccgcctttgagtgagctgataccgctcgccgcagccgaacgaccgagcgcagcgagtcagtgagcgaggaagcggaagagcgcccaatacgcaaaccgcctctccccgcgcgttggccgattcattaatgcagctggcacgacaggtttcccgactggaaagcgggcagtgagcgcaacgcaattaatgtgagttagctcactcattaggcaccccaggctttacactttatgcttccggctcgtatgttgtgtggaattgtgagcggataacaatttcacacaggaaacagcatatgcaaacaagcattactctgacatccaacgcatccggtacgtttgacggttactattacgaactctggaaggatactggcaatacaacaatgacggtctacactcaaggtcgcttttcctgccagtggtcgaacatcaataacgcgttgtttaggaccgggaagaaatacaaccagaattggcagtctcttggcacaatccggatcacgtactctgcgacttacaacccaaacgggaactcctacttgtgtatctatggctggtctaccaacccattggtcgagttctacatcgttgagtcctgggggaactggagaccgcctggtgcctgcgtggcgccggagacaaagatctgcctcgctgacgggcggttcgttagggccgatgagctgttcgaggagctgaaggagcgggggcgcctggttaagtgcgacgagagcgaggaggtgtacgagctgagggagccagttggggtgtccagcctcgacaaggatgcggtggagatcgtcgagggcaagattacgcacgtgtggcgcctcaaggccgacaagctggtcgaggttgaggtgaagaacggcaggtcgatccggaccacgccagagcataagttcctggtcctcgatccttctggcgagatcgttgagaagagggccgatgagctggagatcggggactacattgtgtgcacccagaagctcgtccacgagggcatgtcggaggaggagctcaagagggaggtgttccgcaggctgggcagggacttcttcgtccatctcccggaggaggaggccgagagcgttctggagctcgcgaaggagcggggcatcaaggctctctgggagacgctggaggtggacattgaggagaactcgttctactaccagctcaggaaggggcgcatcagggccgatattctcgtcgacctggctgaggagctgggcctcgacctggctgatctgtacgacgccgtcgaggtttcatacaggtccaataccaagtccacgaagccaatcaggctcccagagccagaggacctcttctacctggcgggcctcatgttcggcgatgggtgctggaaccagctgaccaatggctccgaggccatccagggggaggtgaagcgcattgcgagcgacatgggcctggaggtgcgcgtgcgccgctacgaggggaagacagcccggatcgacttcccagagactgtgcctcgcattctggaggctctcttcgattacccaaggcggaagaaggcccaccggatccgcgtcaacgatttcctcacaagggcgcctctggactgcatcgctgagttcattcggggctacttcgacgcggatggcacagttgaggaggggcggagcgctgtttcggtgacttcggtctctcgcgagttcctggaggatctccagctcctgctccagaagttcgacgtggcttcttacctgagggagggcgatggggcttacaccctctacgtgtccggcgctaggtcactggagaggttcccagggttcagggagccagagaaggctgagaagctgaagaagctcatggagaaggcctcgtcttcagagctggagaaggtcccgatctccggcgagattctcagggaggtcaggggggacgttcccacaactcgcatgttcaactgctactcaaattacgagggcgggcaagtgggcctcaccaagtccagcctggagaaggtcatctccacgctggaggctgtcggcgttgagggggaggctctggagaggctcaaggctctggcgcgggacgatgtgtgcttcctggaggtggtccgcgttgaggaggtggagtacgacggctacgtctacgacttcacagtggaggagcatcataacttcgctgcggagggcttcgtggttcataatacgtccctgggccaagtgacaatcgatggcgggacctacgacatctataggacgacacgcgtcaaccagccttccattgtggggacagccacgttcgatcagtactggagcgtgcgcacctctaagcggacttcaggaacagtgaccgtgaccgatcacttccgcgcctgggcgaaccggggcctgaacctcggcacaatagaccaaattacattgtgcgtggagggttaccaaagctctggatcagccaacatcacccagaacaccttctctcagggctcttcttccggcagttcgggtggctcatccggctccacaacgactactcgcatcgagtgtgagaacatgtccttgtccggaccctacgttagcaggatcaccaatccctttaatggtattgcgctgtacgccaacggagacacagcccgcgctaccgttaacttccccgcaagtcgcaactacaatttccgcctgcggggttgcggcaacaacaataatcttgcccgtgtggacctgaggatcgacggacggaccgtcgggaccttttattaccagggcacatacccctgggaggccccaattgacaatgtttatgtcagtgcggggagtcatacagtcgaaatcactgttactgcggataacggcacatgggacgtgtatgccgactacctggtgatacagtgactcgagggggggcccggtacccaattcgccctatagtgagtcgtattacaattcactggccgtcgttttacaacgtcgtgactgggaaaaccctggcgttacccaacttaatcgccttgcagcacatccccctttcgccagctggcgtaatagcgaagaggcccgcaccgatcgcccttcccaacagttgcgcagcctgaatggcgaatggaaattgtaagcgttaatattttgttaaaattcgcgttaaatttttgttaaatcagctcattttttaaccaataggccgaaatcggcaaaatcccttataaatcaaaagaatagaccgagatagggttgagtgttgttccagtttggaacaagagtccactattaaagaacgtggactccaacgtcaaagggcgaaaaaccgtctatcagggcgatggcccactacgtgaaccatcaccctaatcaagttttttggggtcgaggtgccgtaaagcactaaatcggaaccctaaagggagcccccgatttagagcttgacggggaaagccggcgaacgtggcgagaaaggaagggaagaaagcgaaaggagcgggcgctagggcgctggcaagtgtagcggtcacgctgcgcgtaaccaccacacccgccgcgcttaatgcgccgctacagggcgcgtcaggtg

SEQ ID NO: 3222 - DNA, 4745 bp, Artificial Sequence
  Synthetic Construct, AT-65 intein modified protein encoding nucleic acids in pBluescript
gcacttttcggggaaatgtgcgcggaacccctatttgtttatttttctaaatacattcaaatatgtatccgctcatgagacaataaccctgataaatgcttcaataatattgaaaaaggaagagtatgagtattcaacatttccgtgtcgcccttattcccttttttgcggcattttgccttcctgtttttgctcacccagaaacgctggtgaaagtaaaagatgctgaagatcagttgggtgcacgagtgggttacatcgaactggatctcaacagcggtaagatccttgagagttttcgccccgaagaacgttttccaatgatgagcacttttaaagttctgctatgtggcgcggtattatcccgtattgacgccgggcaagagcaactcggtcgccgcatacactattctcagaatgacttggttgagtactcaccagtcacagaaaagcatcttacggatggcatgacagtaagagaattatgcagtgctgccataaccatgagtgataacactgcggccaacttacttctgacaacgatcggaggaccgaaggagctaaccgcttttttgcacaacatgggggatcatgtaactcgccttgatcgttgggaaccggagctgaatgaagccataccaaacgacgagcgtgacaccacgatgcctgtagcaatggcaacaacgttgcgcaaactattaactggcgaactacttactctagcttcccggcaacaattaatagactggatggaggcggataaagttgcaggaccacttctgcgctcggcccttccggctggctggtttattgctgataaatctggagccggtgagcgtgggtctcgcggtatcattgcagcactggggccagatggtaagccctcccgtatcgtagttatctacacgacggggagtcaggcaactatggatgaacgaaatagacagatcgctgagataggtgcctcactgattaagcattggtaactgtcagaccaagtttactcatatatactttagattgatttaaaacttcatttttaatttaaaaggatctaggtgaagatcctttttgataatctcatgaccaaaatcccttaacgtgagttttcgttccactgagcgtcagaccccgtagaaaagatcaaaggatcttcttgagatcctttttttctgcgcgtaatctgctgcttgcaaacaaaaaaaccaccgctaccagcggtggtttgtttgccggatcaagagctaccaactctttttccgaaggtaactggcttcagcagagcgcagataccaaatactgtccttctagtgtagccgtagttaggccaccacttcaagaactctgtagcaccgcctacatacctcgctctgctaatcctgttaccagtggctgctgccagtggcgataagtcgtgtcttaccgggttggactcaagacgatagttaccggataaggcgcagcggtcgggctgaacggggggttcgtgcacacagcccagcttggagcgaacgacctacaccgaactgagatacctacagcgtgagctatgagaaagcgccacgcttcccgaagggagaaaggcggacaggtatccggtaagcggcagggtcggaacaggagagcgcacgagggagcttccagggggaaacgcctggtatctttatagtcctgtcgggtttcgccacctctgacttgagcgtcgatttttgtgatgctcgtcaggggggcggagcctatggaaaaacgccagcaacgcggcctttttacggttcctggccttttgctggccttttgctcacatgttctttcctgcgttatcccctgattctgtggataaccgtattaccgcctttgagtgagctgataccgctcgccgcagccgaacgaccgagcgcagcgagtcagtgagcgaggaagcggaagagcgcccaatacgcaaaccgcctctccccgcgcgttggccgattcattaatgcagctggcacgacaggtttcccgactggaaagcgggcagtgagcgcaacgcaattaatgtgagttagctcactcattaggcaccccaggctttacactttatgcttccggctcgtatgttgtgtggaattgtgagcggataacaatttcacacaggaaacagcatatgcaaacaagcattactctgacatccaacgcatccggtacgtttgacggttactattacgaactctggaaggatactggcaatacaacaatgacggtctacactcaaggtcgcttttcctgccagtggtcgaacatcaataacgcgttgtttaggaccgggaagaaatacaaccagaattggcagtctcttggcacaatccggatcacgtactctgcgacttacaacccaaacgggaactcctacttgtgtatctatggctggtctaccaacccattggtcgagttctacatcgttgagtcctgggggaactggagaccgcctggtgcctcggtttcggctgatactcctattctcgttaggcgggggggggaggttctgcgggttactttcgaggatctggactcatggtacttcggcgacaggggcggggagtatgtggacgtgtctgacctggaggtcctgaccgttgaccggaacttccgcgtcacgtgggctcgcgttagcaagctgatccggcaccgcgccaggaagattctcagggtgcatctggaggacggcacaatcgagctcactgggaatcacgccgtcatggttctggatgagggcgggctcagggctgtcaaggcttcggagattgaggagggctcattcctcctgtccttcgtggcggagctggacgagcagccaacagatggcgggaccgtggtcacgtccgtcggctcggggtctcgcgtgagcgacaccacgtacgagctgccagtggaggtccgcgttgagctcctgagggagctcgccgacgatggcgtgatcgaggcgagcgaggacgtgtcggtcgatctcgcttggctggcccggatttctggcgtcgagtcacgcgttaccgacgatggggtggagctcgtctgggagacaaggactggcgacctcctgccagctgatccagtgctcaagctggtcgagcggctggagtcggacctggtcgacgacctggagtcttgggtcttcgatggcagggtgtcaaaggaggcggttcggaaggtgctgtccagcgtggacgctaagaacctcaggggggatgctaggagggcttacaggatgctccggaccctggttcgctccgacgtgcatgcggttaaggtggaggacctggatgtcatggactacgatggctacgtgtacgacgtttctgttccaggcaatgagatgttcttcgccggggaggttccagttctgctgcataatacgtccctgggccaagtgacaatcgatggcgggacctacgacatctataggacgacacgcgtcaaccagccttccattgtggggacagccacgttcgatcagtactggagcgtgcgcacctctaagcggacttcaggaacagtgaccgtgaccgatcacttccgcgcctgggcgaaccggggcctgaacctcggcacaatagaccaaattacattgtgcgtggagggttaccaaagctctggatcagccaacatcacccagaacaccttctctcagggctcttcttccggcagttcgggtggctcatccggctccacaacgactactcgcatcgagtgtgagaacatgtccttgtccggaccctacgttagcaggatcaccaatccctttaatggtattgcgctgtacgccaacggagacacagcccgcgctaccgttaacttccccgcaagtcgcaactacaatttccgcctgcggggttgcggcaacaacaataatcttgcccgtgtggacctgaggatcgacggacggaccgtcgggaccttttattaccagggcacatacccctgggaggccccaattgacaatgtttatgtcagtgcggggagtcatacagtcgaaatcactgttactgcggataacggcacatgggacgtgtatgccgactacctggtgatacagtgactcgagggggggcccggtacccaattcgccctatagtgagtcgtattacaattcactggccgtcgttttacaacgtcgtgactgggaaaaccctggcgttacccaacttaatcgccttgcagcacatccccctttcgccagctggcgtaatagcgaagaggcccgcaccgatcgcccttcccaacagttgcgcagcctgaatggcgaatggaaattgtaagcgttaatattttgttaaaattcgcgttaaatttttgttaaatcagctcattttttaaccaataggccgaaatcggcaaaatcccttataaatcaaaagaatagaccgagatagggttgagtgttgttccagtttggaacaagagtccactattaaagaacgtggactccaacgtcaaagggcgaaaaaccgtctatcagggcgatggcccactacgtgaaccatcaccctaatcaagttttttggggtcgaggtgccgtaaagcactaaatcggaaccctaaagggagcccccgatttagagcttgacggggaaagccggcgaacgtggcgagaaaggaagggaagaaagcgaaaggagcgggcgctagggcgctggcaagtgtagcggtcacgctgcgcgtaaccaccacacccgccgcgcttaatgcgccgctacagggcgcgtcaggtg

SEQ ID NO: 3223 - DNA, 5276 bp, Artificial Sequence
  Synthetic Construct, AT-66 intein modified protein encoding nucleic acids in pBluescript
gcacttttcggggaaatgtgcgcggaacccctatttgtttatttttctaaatacattcaaatatgtatccgctcatgagacaataaccctgataaatgcttcaataatattgaaaaaggaagagtatgagtattcaacatttccgtgtcgcccttattcccttttttgcggcattttgccttcctgtttttgctcacccagaaacgctggtgaaagtaaaagatgctgaagatcagttgggtgcacgagtgggttacatcgaactggatctcaacagcggtaagatccttgagagttttcgccccgaagaacgttttccaatgatgagcacttttaaagttctgctatgtggcgcggtattatcccgtattgacgccgggcaagagcaactcggtcgccgcatacactattctcagaatgacttggttgagtactcaccagtcacagaaaagcatcttacggatggcatgacagtaagagaattatgcagtgctgccataaccatgagtgataacactgcggccaacttacttctgacaacgatcggaggaccgaaggagctaaccgcttttttgcacaacatgggggatcatgtaactcgccttgatcgttgggaaccggagctgaatgaagccataccaaacgacgagcgtgacaccacgatgcctgtagcaatggcaacaacgttgcgcaaactattaactggcgaactacttactctagcttcccggcaacaattaatagactggatggaggcggataaagttgcaggaccacttctgcgctcggcccttccggctggctggtttattgctgataaatctggagccggtgagcgtgggtctcgcggtatcattgcagcactggggccagatggtaagccctcccgtatcgtagttatctacacgacggggagtcaggcaactatggatgaacgaaatagacagatcgctgagataggtgcctcactgattaagcattggtaactgtcagaccaagtttactcatatatactttagattgatttaaaacttcatttttaatttaaaaggatctaggtgaagatcctttttgataatctcatgaccaaaatcccttaacgtgagttttcgttccactgagcgtcagaccccgtagaaaagatcaaaggatcttcttgagatcctttttttctgcgcgtaatctgctgcttgcaaacaaaaaaaccaccgctaccagcggtggtttgtttgccggatcaagagctaccaactctttttccgaaggtaactggcttcagcagagcgcagataccaaatactgtccttctagtgtagccgtagttaggccaccacttcaagaactctgtagcaccgcctacatacctcgctctgctaatcctgttaccagtggctgctgccagtggcgataagtcgtgtcttaccgggttggactcaagacgatagttaccggataaggcgcagcggtcgggctgaacggggggttcgtgcacacagcccagcttggagcgaacgacctacaccgaactgagatacctacagcgtgagctatgagaaagcgccacgcttcccgaagggagaaaggcggacaggtatccggtaagcggcagggtcggaacaggagagcgcacgagggagcttccagggggaaacgcctggtatctttatagtcctgtcgggtttcgccacctctgacttgagcgtcgatttttgtgatgctcgtcaggggggcggagcctatggaaaaacgccagcaacgcggcctttttacggttcctggccttttgctggccttttgctcacatgttctttcctgcgttatcccctgattctgtggataaccgtattaccgcctttgagtgagctgataccgctcgccgcagccgaacgaccgagcgcagcgagtcagtgagcgaggaagcggaagagcgcccaatacgcaaaccgcctctccccgcgcgttggccgattcattaatgcagctggcacgacaggtttcccgactggaaagcgggcagtgagcgcaacgcaattaatgtgagttagctcactcattaggcaccccaggctttacactttatgcttccggctcgtatgttgtgtggaattgtgagcggataacaatttcacacaggaaacagcatatgcaaacaagcattactctgacatccaacgcatccggtacgtttgacggttactattacgaactctggaaggatactggcaatacaacaatgacggtctacactcaaggtcgcttttcctgccagtggtcgaacatcaataacgcgttgtttaggaccgggaagaaatacaaccagaattggcagtctcttggcacaatccggatcacgtactctgcgacttacaacccaaacgggaactcctacttgtgtatctatggctggtctaccaacccattggtcgagttctacatcgttgagtcctgggggaactggagaccgcctggtgcctgcctcgcgccggggacaaagattctcacggagcatggctgctgggttaaggtggaggatctccctaagatgctgaccgatcagaagctgaaggtttacgacgtggatgagggccgcgaggacgattccgagatcaagttcgtcatggagaggggcattgaggaggacgagagggctgtggtcctcgtgaccgagtcaggcctgacgatcgaggggtccgaggatcacccagtcctcacccctgagggctacgttgagctgggggagattgaggagggcgacctcgttgtggtctacccgttcgagggcgtcgagtacgaggagaaggagggcacgatcctcgacgagtccgatttcgaggacgtggatccccaggtcctcaggtacctggaggagagggacctcatcccactgaggtggagcgatccaaaagtggggacgctcgccaggattctgggcttcgcgatgggcgacgggcacctgggcgagcaggctgggcggctcaccctgtctttctacggcgacgagcgcacgctcagggagctgaagcgcgacctggagtcactgggcgtcaaggcgaacctccatgttcgcaagcgccgctacgagatcgagacagctagcggccgctacgagggggaggctacttcggttgagctgcgggtggcgtcgcgctctttcgctctcctgatggagaagctcggcatgccaagggggcggaaggtggagaccccgtacaaggtccccgattggatcaaggaggcgcctctgtgggtgaagaggaacttcctcgctgggctgttcgctgctgacggctcggttgtgaagttcaagcggtacacaccgctccccatcaatctgactcaggccaaggtcgaggagctggaggagaacctgcgggagttcatgaatgacgtggcgaagctcctgcgcgagttcggcattgagaccacgctgtacgaggtcaagagcaagaagaacgtcgtttacaagctggccatcgtgggcgaggagaatattaagcgcttcctcggcaaggtcgggtacgagtacgatccagagaagaaggtggagggcctcgctgcctacgcgtacctcaagctgaaggagcgcgtcaagaaggacaggaaggaggctgctgagacagctgctgaggtgtacgaggagacaggctccatcactaaggcccatgaggctgtcgctgacgtggtcaacaggaggttcgtggagagggttgtgtacgacggcgggatttccagcgtgcgggtcccagaggatttccctaccttcgagcggttcaaggaggagagggttctcgctggcgggttcgtgatcgaggaggtcgttgaggtcaagggcgttgagccggagtacgacaggttctacgatattggggtttgccacggggctcataacttcattgcggatggggtcgtcgttcataatacgtccctgggccaagtgacaatcgatggcgggacctacgacatctataggacgacacgcgtcaaccagccttccattgtggggacagccacgttcgatcagtactggagcgtgcgcacctctaagcggacttcaggaacagtgaccgtgaccgatcacttccgcgcctgggcgaaccggggcctgaacctcggcacaatagaccaaattacattgtgcgtggagggttaccaaagctctggatcagccaacatcacccagaacaccttctctcagggctcttcttccggcagttcgggtggctcatccggctccacaacgactactcgcatcgagtgtgagaacatgtccttgtccggaccctacgttagcaggatcaccaatccctttaatggtattgcgctgtacgccaacggagacacagcccgcgctaccgttaacttccccgcaagtcgcaactacaatttccgcctgcggggttgcggcaacaacaataatcttgcccgtgtggacctgaggatcgacggacggaccgtcgggaccttttattaccagggcacatacccctgggaggccccaattgacaatgtttatgtcagtgcggggagtcatacagtcgaaatcactgttactgcggataacggcacatgggacgtgtatgccgactacctggtgatacagtgactcgagggggggcccggtacccaattcgccctatagtgagtcgtattacaattcactggccgtcgttttacaacgtcgtgactgggaaaaccctggcgttacccaacttaatcgccttgcagcacatccccctttcgccagctggcgtaatagcgaagaggcccgcaccgatcgcccttcccaacagttgcgcagcctgaatggcgaatggaaattgtaagcgttaatattttgttaaaattcgcgttaaatttttgttaaatcagctcattttttaaccaataggccgaaatcggcaaaatcccttataaatcaaaagaatagaccgagatagggttgagtgttgttccagtttggaacaagagtccactattaaagaacgtggactccaacgtcaaagggcgaaaaaccgtctatcagggcgatggcccactacgtgaaccatcaccctaatcaagttttttggggtcgaggtgccgtaaagcactaaatcggaaccctaaagggagcccccgatttagagcttgacggggaaagccggcgaacgtggcgagaaaggaagggaagaaagcgaaaggagcgggcgctagggcgctggcaagtgtagcggtcacgctgcgcgtaaccaccacacccgccgcgcttaatgcgccgctacagggcgcgtcaggtg

SEQ ID NO: 3224 - DNA, 5381 bp, Artificial Sequence
  Synthetic Construct, AT-67 intein modified protein encoding nucleic acids in pBluescript
gcacttttcggggaaatgtgcgcggaacccctatttgtttatttttctaaatacattcaaatatgtatccgctcatgagacaataaccctgataaatgcttcaataatattgaaaaaggaagagtatgagtattcaacatttccgtgtcgcccttattcccttttttgcggcattttgccttcctgtttttgctcacccagaaacgctggtgaaagtaaaagatgctgaagatcagttgggtgcacgagtgggttacatcgaactggatctcaacagcggtaagatccttgagagttttcgccccgaagaacgttttccaatgatgagcacttttaaagttctgctatgtggcgcggtattatcccgtattgacgccgggcaagagcaactcggtcgccgcatacactattctcagaatgacttggttgagtactcaccagtcacagaaaagcatcttacggatggcatgacagtaagagaattatgcagtgctgccataaccatgagtgataacactgcggccaacttacttctgacaacgatcggaggaccgaaggagctaaccgcttttttgcacaacatgggggatcatgtaactcgccttgatcgttgggaaccggagctgaatgaagccataccaaacgacgagcgtgacaccacgatgcctgtagcaatggcaacaacgttgcgcaaactattaactggcgaactacttactctagcttcccggcaacaattaatagactggatggaggcggataaagttgcaggaccacttctgcgctcggcccttccggctggctggtttattgctgataaatctggagccggtgagcgtgggtctcgcggtatcattgcagcactggggccagatggtaagccctcccgtatcgtagttatctacacgacggggagtcaggcaactatggatgaacgaaatagacagatcgctgagataggtgcctcactgattaagcattggtaactgtcagaccaagtttactcatatatactttagattgatttaaaacttcatttttaatttaaaaggatctaggtgaagatcctttttgataatctcatgaccaaaatcccttaacgtgagttttcgttccactgagcgtcagaccccgtagaaaagatcaaaggatcttcttgagatcctttttttctgcgcgtaatctgctgcttgcaaacaaaaaaaccaccgctaccagcggtggtttgtttgccggatcaagagctaccaactctttttccgaaggtaactggcttcagcagagcgcagataccaaatactgtccttctagtgtagccgtagttaggccaccacttcaagaactctgtagcaccgcctacatacctcgctctgctaatcctgttaccagtggctgctgccagtggcgataagtcgtgtcttaccgggttggactcaagacgatagttaccggataaggcgcagcggtcgggctgaacggggggttcgtgcacacagcccagcttggagcgaacgacctacaccgaactgagatacctacagcgtgagctatgagaaagcgccacgcttcccgaagggagaaaggcggacaggtatccggtaagcggcagggtcggaacaggagagcgcacgagggagcttccagggggaaacgcctggtatctttatagtcctgtcgggtttcgccacctctgacttgagcgtcgatttttgtgatgctcgtcaggggggcggagcctatggaaaaacgccagcaacgcggcctttttacggttcctggccttttgctggccttttgctcacatgttctttcctgcgttatcccctgattctgtggataaccgtattaccgcctttgagtgagctgataccgctcgccgcagccgaacgaccgagcgcagcgagtcagtgagcgaggaagcggaagagcgcccaatacgcaaaccgcctctccccgcgcgttggccgattcattaatgcagctggcacgacaggtttcccgactggaaagcgggcagtgagcgcaacgcaattaatgtgagttagctcactcattaggcaccccaggctttacactttatgcttccggctcgtatgttgtgtggaattgtgagcggataacaatttcacacaggaaacagcatatgcaaacaagcattactctgacatccaacgcatccggtacgtttgacggttactattacgaactctggaaggatactggcaatacaacaatgacggtctacactcaaggtcgcttttcctgccagtggtcgaacatcaataacgcgttgtttaggaccgggaagaaatacaaccagaattggcagtctcttggcacaatccggatcacgtactctgcgacttacaacccaaacgggaactcctacttgtgtatctatggctggtctaccaacccattggtcgagttctacatcgttgagtcctgggggaactggagaccgcctggtgcctgcttcgcgcctgggacaagggttattacggcctcgggggacgtggtggagattgatgagatcgtggagcgggctgcggagacggctgtggacggcgggctgagggagggctctacagaggttactgtgggggtcaccaacgtcaggacgctggctgcttgggacggcgatctcacctctaatgacgtggtcgcggtggagaagatcgaggctccgtcacgggccgttcgcgtgaggaccaggtccggcgctgagctggttgtgagcgaggaccacaagttcctcgtggacacggaggatggcccaaggatggtcgaggctagcgagctcaagtcgggggatgagctgtactcggtgcgggagctccgcgtgtctgagaaggtcccaacatacctggagctcctgctggaggccgaggacaagttctacgtgcatcctactgaggagttcgaggaggctgtcgctgagcgctacggctccctggctgaggcttgcagggagaaggagctcccatacagggccagggaggctaaggagcgcaggtactacgagctgagcgagttcgctaggctcgctacggctgttatcgagtcggtggacgaggccacagagtacattgattacgtcactgcgggcgggcggaagcgcgttaagttctccagcccaaggccaggcaaggaggtcatgtatgtggcgggcctgatcgcttcagacgggtccgttgatacagagaggggcttcgtgatgttctcaaacactgagcgggagctgctctccgcgttcgaggagattgtcacagaggagttcggcgttgacgcctcgaagaccgagaaccagaatggggtcacgatgctgagggtcaattcccgggttctcgcgcgcgtgttcgagaggctggctgacccgaagactgtcctcaagatgccccgcgagctcgtggctgcttacctggctggctacgtcgacggcgatgggcacctgaaggatgggaagatcgtgattaccacggctgacagggagagggctggcgatctccagctgctcctgaagaggctgggggtgccaagcgtcctcagggagagggacggcgcttacgatgtcgttgtgacagggcacgacgctgctgagctcgctgaggagctcccactgaggcatcctaagaaggctgaggctgctgcttccatgtcgtctggcaggcgctcatccaggttcgaccgggtgagcaggaggttcgggaggctcctgagggaggtgcgcaggaagtacggcgtcagggcttccgatctggggagctcgtctaccatctctcagattgagtcaggcgagaggagggctacgaggaggctcgctctggagatcgtcgagaggctggaggaggtcgttggcgacgttgaggaggtgcgggagctcagggagctggctgagggcaactacgtgctggatgaggtggtcgaggtcgagacggttgagtacgagcatgagtacctctacgatgttacagtggttccagatcatactctcgtggttgagaatggcatcattacaagcaacacgtccctgggccaagtgacaatcgatggcgggacctacgacatctataggacgacacgcgtcaaccagccttccattgtggggacagccacgttcgatcagtactggagcgtgcgcacctctaagcggacttcaggaacagtgaccgtgaccgatcacttccgcgcctgggcgaaccggggcctgaacctcggcacaatagaccaaattacattgtgcgtggagggttaccaaagctctggatcagccaacatcacccagaacaccttctctcagggctcttcttccggcagttcgggtggctcatccggctccacaacgactactcgcatcgagtgtgagaacatgtccttgtccggaccctacgttagcaggatcaccaatccctttaatggtattgcgctgtacgccaacggagacacagcccgcgctaccgttaacttccccgcaagtcgcaactacaatttccgcctgcggggttgcggcaacaacaataatcttgcccgtgtggacctgaggatcgacggacggaccgtcgggaccttttattaccagggcacatacccctgggaggccccaattgacaatgtttatgtcagtgcggggagtcatacagtcgaaatcactgttactgcggataacggcacatgggacgtgtatgccgactacctggtgatacagtgactcgagggggggcccggtacccaattcgccctatagtgagtcgtattacaattcactggccgtcgttttacaacgtcgtgactgggaaaaccctggcgttacccaacttaatcgccttgcagcacatccccctttcgccagctggcgtaatagcgaagaggcccgcaccgatcgcccttcccaacagttgcgcagcctgaatggcgaatggaaattgtaagcgttaatattttgttaaaattcgcgttaaatttttgttaaatcagctcattttttaaccaataggccgaaatcggcaaaatcccttataaatcaaaagaatagaccgagatagggttgagtgttgttccagtttggaacaagagtccactattaaagaacgtggactccaacgtcaaagggcgaaaaaccgtctatcagggcgatggcccactacgtgaaccatcaccctaatcaagttttttggggtcgaggtgccgtaaagcactaaatcggaaccctaaagggagcccccgatttagagcttgacggggaaagccggcgaacgtggcgagaaaggaagggaagaaagcgaaaggagcgggcgctagggcgctggcaagtgtagcggtcacgctgcgcgtaaccaccacacccgccgcgcttaatgcgccgctacagggcgcgtcaggtg

SEQ ID NO: 3225 - DNA, 4781 bp, Artificial Sequence
  Synthetic Construct, AT-68 intein modified protein encoding nucleic acids in pBluescript
gcacttttcggggaaatgtgcgcggaacccctatttgtttatttttctaaatacattcaaatatgtatccgctcatgagacaataaccctgataaatgcttcaataatattgaaaaaggaagagtatgagtattcaacatttccgtgtcgcccttattcccttttttgcggcattttgccttcctgtttttgctcacccagaaacgctggtgaaagtaaaagatgctgaagatcagttgggtgcacgagtgggttacatcgaactggatctcaacagcggtaagatccttgagagttttcgccccgaagaacgttttccaatgatgagcacttttaaagttctgctatgtggcgcggtattatcccgtattgacgccgggcaagagcaactcggtcgccgcatacactattctcagaatgacttggttgagtactcaccagtcacagaaaagcatcttacggatggcatgacagtaagagaattatgcagtgctgccataaccatgagtgataacactgcggccaacttacttctgacaacgatcggaggaccgaaggagctaaccgcttttttgcacaacatgggggatcatgtaactcgccttgatcgttgggaaccggagctgaatgaagccataccaaacgacgagcgtgacaccacgatgcctgtagcaatggcaacaacgttgcgcaaactattaactggcgaactacttactctagcttcccggcaacaattaatagactggatggaggcggataaagttgcaggaccacttctgcgctcggcccttccggctggctggtttattgctgataaatctggagccggtgagcgtgggtctcgcggtatcattgcagcactggggccagatggtaagccctcccgtatcgtagttatctacacgacggggagtcaggcaactatggatgaacgaaatagacagatcgctgagataggtgcctcactgattaagcattggtaactgtcagaccaagtttactcatatatactttagattgatttaaaacttcatttttaatttaaaaggatctaggtgaagatcctttttgataatctcatgaccaaaatcccttaacgtgagttttcgttccactgagcgtcagaccccgtagaaaagatcaaaggatcttcttgagatcctttttttctgcgcgtaatctgctgcttgcaaacaaaaaaaccaccgctaccagcggtggtttgtttgccggatcaagagctaccaactctttttccgaaggtaactggcttcagcagagcgcagataccaaatactgtccttctagtgtagccgtagttaggccaccacttcaagaactctgtagcaccgcctacatacctcgctctgctaatcctgttaccagtggctgctgccagtggcgataagtcgtgtcttaccgggttggactcaagacgatagttaccggataaggcgcagcggtcgggctgaacggggggttcgtgcacacagcccagcttggagcgaacgacctacaccgaactgagatacctacagcgtgagctatgagaaagcgccacgcttcccgaagggagaaaggcggacaggtatccggtaagcggcagggtcggaacaggagagcgcacgagggagcttccagggggaaacgcctggtatctttatagtcctgtcgggtttcgccacctctgacttgagcgtcgatttttgtgatgctcgtcaggggggcggagcctatggaaaaacgccagcaacgcggcctttttacggttcctggccttttgctggccttttgctcacatgttctttcctgcgttatcccctgattctgtggataaccgtattaccgcctttgagtgagctgataccgctcgccgcagccgaacgaccgagcgcagcgagtcagtgagcgaggaagcggaagagcgcccaatacgcaaaccgcctctccccgcgcgttggccgattcattaatgcagctggcacgacaggtttcccgactggaaagcgggcagtgagcgcaacgcaattaatgtgagttagctcactcattaggcaccccaggctttacactttatgcttccggctcgtatgttgtgtggaattgtgagcggataacaatttcacacaggaaacagcatatgcaaacaagcattactctgacatccaacgcatccggtacgtttgacggttactattacgaactctggaaggatactggcaatacaacaatgacggtctacactcaaggtcgcttttcctgccagtggtcgaacatcaataacgcgttgtttaggaccgggaagaaatacaaccagaattggcagtctcttggcacaatccggatcacgtactctgcgacttacaacccaaacgggaactcctacttgtgtatctatggctggtctaccaacccattggtcgagttctacatcgttgagtcctgggggaactggagaccgcctggtgcctgctcgtggacaaacgctagggcggttacaaggcgggggttcgtgcatgtggatgatctcactactgatgatgaggtcatgtcggtcgacgatcagggcaggacaatctggcagcagattgacgaggtggtccggttcccgttcagcggcacgctctactcgctgggcgggagggagatcaacgctaccattacggccaatcaccgggttgtgggcctcaaccgcgagaagaccaagtgggttgagcatacaccaacttccctgcctggcaacaagatgtgggtgtacaccgctggcgaggggagcaatgaggactacccgctcaccgatacggagatcaggctcgctgtgtggggcctgacagactcgcacaggtctcccgatggccggtggactttctaccagtccggggagaaggcggagcaggtcaggaagctcctggctgacgctggcattgagtacagggagagggctaggaacaggggcatcaccgagattgatgggaaggtcctcaaggcgccgcccaagacgcagtacgagttctcgctcggcaaggttcaggagctggacgatctcctggacagggggaggagcgagctgccaacatggactctctccctgagccagaggcaggctaggctcttcctggaggagtacaggttcaccgacggcacggataccacgtcagctggggactcctacgtcctctacgtttgcaaggatcgcatgagggagcagctccagatgctggctgctgctaacggcctcagggcttccacaactgagtacaggccagggcattggaggctgaacatctctaatagggcgctctcaggcctgtacaagaataccgtggaggaggtcgcttacgagggggaagtgtggtgcctgcgggttccaaatggcaggttcttcattgaggatgggggcaagattcatctcacgggcaacacgtccctgggccaagtgacaatcgatggcgggacctacgacatctataggacgacacgcgtcaaccagccttccattgtggggacagccacgttcgatcagtactggagcgtgcgcacctctaagcggacttcaggaacagtgaccgtgaccgatcacttccgcgcctgggcgaaccggggcctgaacctcggcacaatagaccaaattacattgtgcgtggagggttaccaaagctctggatcagccaacatcacccagaacaccttctctcagggctcttcttccggcagttcgggtggctcatccggctccacaacgactactcgcatcgagtgtgagaacatgtccttgtccggaccctacgttagcaggatcaccaatccctttaatggtattgcgctgtacgccaacggagacacagcccgcgctaccgttaacttccccgcaagtcgcaactacaatttccgcctgcggggttgcggcaacaacaataatcttgcccgtgtggacctgaggatcgacggacggaccgtcgggaccttttattaccagggcacatacccctgggaggccccaattgacaatgtttatgtcagtgcggggagtcatacagtcgaaatcactgttactgcggataacggcacatgggacgtgtatgccgactacctggtgatacagtgactcgagggggggcccggtacccaattcgccctatagtgagtcgtattacaattcactggccgtcgttttacaacgtcgtgactgggaaaaccctggcgttacccaacttaatcgccttgcagcacatccccctttcgccagctggcgtaatagcgaagaggcccgcaccgatcgcccttcccaacagttgcgcagcctgaatggcgaatggaaattgtaagcgttaatattttgttaaaattcgcgttaaatttttgttaaatcagctcattttttaaccaataggccgaaatcggcaaaatcccttataaatcaaaagaatagaccgagatagggttgagtgttgttccagtttggaacaagagtccactattaaagaacgtggactccaacgtcaaagggcgaaaaaccgtctatcagggcgatggcccactacgtgaaccatcaccctaatcaagttttttggggtcgaggtgccgtaaagcactaaatcggaaccctaaagggagcccccgatttagagcttgacggggaaagccggcgaacgtggcgagaaaggaagggaagaaagcgaaaggagcgggcgctagggcgctggcaagtgtagcggtcacgctgcgcgtaaccaccacacccgccgcgcttaatgcgccgctacagggcgcgtcaggtg

SEQ ID NO: 3226 - DNA, 4823 bp, Artificial Sequence
  Synthetic Construct, AT-69 intein modified protein encoding nucleic acids in pBluescript
gcacttttcggggaaatgtgcgcggaacccctatttgtttatttttctaaatacattcaaatatgtatccgctcatgagacaataaccctgataaatgcttcaataatattgaaaaaggaagagtatgagtattcaacatttccgtgtcgcccttattcccttttttgcggcattttgccttcctgtttttgctcacccagaaacgctggtgaaagtaaaagatgctgaagatcagttgggtgcacgagtgggttacatcgaactggatctcaacagcggtaagatccttgagagttttcgccccgaagaacgttttccaatgatgagcacttttaaagttctgctatgtggcgcggtattatcccgtattgacgccgggcaagagcaactcggtcgccgcatacactattctcagaatgacttggttgagtactcaccagtcacagaaaagcatcttacggatggcatgacagtaagagaattatgcagtgctgccataaccatgagtgataacactgcggccaacttacttctgacaacgatcggaggaccgaaggagctaaccgcttttttgcacaacatgggggatcatgtaactcgccttgatcgttgggaaccggagctgaatgaagccataccaaacgacgagcgtgacaccacgatgcctgtagcaatggcaacaacgttgcgcaaactattaactggcgaactacttactctagcttcccggcaacaattaatagactggatggaggcggataaagttgcaggaccacttctgcgctcggcccttccggctggctggtttattgctgataaatctggagccggtgagcgtgggtctcgcggtatcattgcagcactggggccagatggtaagccctcccgtatcgtagttatctacacgacggggagtcaggcaactatggatgaacgaaatagacagatcgctgagataggtgcctcactgattaagcattggtaactgtcagaccaagtttactcatatatactttagattgatttaaaacttcatttttaatttaaaaggatctaggtgaagatcctttttgataatctcatgaccaaaatcccttaacgtgagttttcgttccactgagcgtcagaccccgtagaaaagatcaaaggatcttcttgagatcctttttttctgcgcgtaatctgctgcttgcaaacaaaaaaaccaccgctaccagcggtggtttgtttgccggatcaagagctaccaactctttttccgaaggtaactggcttcagcagagcgcagataccaaatactgtccttctagtgtagccgtagttaggccaccacttcaagaactctgtagcaccgcctacatacctcgctctgctaatcctgttaccagtggctgctgccagtggcgataagtcgtgtcttaccgggttggactcaagacgatagttaccggataaggcgcagcggtcgggctgaacggggggttcgtgcacacagcccagcttggagcgaacgacctacaccgaactgagatacctacagcgtgagctatgagaaagcgccacgcttcccgaagggagaaaggcggacaggtatccggtaagcggcagggtcggaacaggagagcgcacgagggagcttccagggggaaacgcctggtatctttatagtcctgtcgggtttcgccacctctgacttgagcgtcgatttttgtgatgctcgtcaggggggcggagcctatggaaaaacgccagcaacgcggcctttttacggttcctggccttttgctggccttttgctcacatgttctttcctgcgttatcccctgattctgtggataaccgtattaccgcctttgagtgagctgataccgctcgccgcagccgaacgaccgagcgcagcgagtcagtgagcgaggaagcggaagagcgcccaatacgcaaaccgcctctccccgcgcgttggccgattcattaatgcagctggcacgacaggtttcccgactggaaagcgggcagtgagcgcaacgcaattaatgtgagttagctcactcattaggcaccccaggctttacactttatgcttccggctcgtatgttgtgtggaattgtgagcggataacaatttcacacaggaaacagcatatgcaaacaagcattactctgacatccaacgcatccggtacgtttgacggttactattacgaactctggaaggatactggcaatacaacaatgacggtctacactcaaggtcgcttttcctgccagtggtcgaacatcaataacgcgttgtttaggaccgggaagaaatacaaccagaattggcagtctcttggcacaatccggatcacgtactctgcgacttacaacccaaacgggaactcctacttgtgtatctatggctggtctaccaacccattggtcgagttctacatcgttgagtcctgggggaactggagaccgcctggtgcctcgctcgcctgctctactcctattctgactacaaatgggtggtcaactatgggggctctccaggacggggatgaggtctacgcgcctgacggccagcctaccaaggtcatcaaggcccaccccattaacctcaataggccatgcttcaaggtccggttccgcgacggccaggaggtggtcacggatgcggagcatctgtggcaggtgaacgaccggaacaatggcgggagggatcgggtcatgaccacgcaggagatcgctgacgctccatggggcgggcgctacaggttccgggtcccagttaccgagcctctccagacgccagaggctgacctgccagtggatccatggctcctgggcgcttggctcggcgacggggatgcctcgatggtctctatctgctccggcagccaggacctcgattacctgatttctagggtcgagggcctcgggctgtcacacagggttaaccgctacggctcacgcgccgcttccgtctacgtgcatggcatgagggctgtgttctcggagctcgggctcctgaagaataagcacatccccgacaggtacctgaccgcttctgtcgctcagaggaggcagctcctggctggcctgatggacagcgatgggacagtttcggatcgccaagtgactattagcatgaagaacgagaggctcatgaggcaggtgctccagctggtccggtccctgggctacagggctggcttcgggagccgcatggctaggctcaatggcagggactgcgggctggtctacgtggtgcgcttccatacaggctggggggagtcgcccttcgacatgccacgcaagagggatggctgggagcaggcgacaaagacttccgttcagaacctccggctgaatgccatcgttgcggtggagcctgtcgagaccgtcccggttcgctgcattactgttgctcatgagtcttcgctctacgttgctggggaggggttcgttcctacacataatacgtccctgggccaagtgacaatcgatggcgggacctacgacatctataggacgacacgcgtcaaccagccttccattgtggggacagccacgttcgatcagtactggagcgtgcgcacctctaagcggacttcaggaacagtgaccgtgaccgatcacttccgcgcctgggcgaaccggggcctgaacctcggcacaatagaccaaattacattgtgcgtggagggttaccaaagctctggatcagccaacatcacccagaacaccttctctcagggctcttcttccggcagttcgggtggctcatccggctccacaacgactactcgcatcgagtgtgagaacatgtccttgtccggaccctacgttagcaggatcaccaatccctttaatggtattgcgctgtacgccaacggagacacagcccgcgctaccgttaacttccccgcaagtcgcaactacaatttccgcctgcggggttgcggcaacaacaataatcttgcccgtgtggacctgaggatcgacggacggaccgtcgggaccttttattaccagggcacatacccctgggaggccccaattgacaatgtttatgtcagtgcggggagtcatacagtcgaaatcactgttactgcggataacggcacatgggacgtgtatgccgactacctggtgatacagtgactcgagggggggcccggtacccaattcgccctatagtgagtcgtattacaattcactggccgtcgttttacaacgtcgtgactgggaaaaccctggcgttacccaacttaatcgccttgcagcacatccccctttcgccagctggcgtaatagcgaagaggcccgcaccgatcgcccttcccaacagttgcgcagcctgaatggcgaatggaaattgtaagcgttaatattttgttaaaattcgcgttaaatttttgttaaatcagctcattttttaaccaataggccgaaatcggcaaaatcccttataaatcaaaagaatagaccgagatagggttgagtgttgttccagtttggaacaagagtccactattaaagaacgtggactccaacgtcaaagggcgaaaaaccgtctatcagggcgatggcccactacgtgaaccatcaccctaatcaagttttttggggtcgaggtgccgtaaagcactaaatcggaaccctaaagggagcccccgatttagagcttgacggggaaagccggcgaacgtggcgagaaaggaagggaagaaagcgaaaggagcgggcgctagggcgctggcaagtgtagcggtcacgctgcgcgtaaccaccacacccgccgcgcttaatgcgccgctacagggcgcgtcaggtg

SEQ ID NO: 3227 - DNA, 5138 bp, Artificial Sequence
  Synthetic Construct, AT-70 intein modified protein encoding nucleic acids in pBluescript
gcacttttcggggaaatgtgcgcggaacccctatttgtttatttttctaaatacattcaaatatgtatccgctcatgagacaataaccctgataaatgcttcaataatattgaaaaaggaagagtatgagtattcaacatttccgtgtcgcccttattcccttttttgcggcattttgccttcctgtttttgctcacccagaaacgctggtgaaagtaaaagatgctgaagatcagttgggtgcacgagtgggttacatcgaactggatctcaacagcggtaagatccttgagagttttcgccccgaagaacgttttccaatgatgagcacttttaaagttctgctatgtggcgcggtattatcccgtattgacgccgggcaagagcaactcggtcgccgcatacactattctcagaatgacttggttgagtactcaccagtcacagaaaagcatcttacggatggcatgacagtaagagaattatgcagtgctgccataaccatgagtgataacactgcggccaacttacttctgacaacgatcggaggaccgaaggagctaaccgcttttttgcacaacatgggggatcatgtaactcgccttgatcgttgggaaccggagctgaatgaagccataccaaacgacgagcgtgacaccacgatgcctgtagcaatggcaacaacgttgcgcaaactattaactggcgaactacttactctagcttcccggcaacaattaatagactggatggaggcggataaagttgcaggaccacttctgcgctcggcccttccggctggctggtttattgctgataaatctggagccggtgagcgtgggtctcgcggtatcattgcagcactggggccagatggtaagccctcccgtatcgtagttatctacacgacggggagtcaggcaactatggatgaacgaaatagacagatcgctgagataggtgcctcactgattaagcattggtaactgtcagaccaagtttactcatatatactttagattgatttaaaacttcatttttaatttaaaaggatctaggtgaagatcctttttgataatctcatgaccaaaatcccttaacgtgagttttcgttccactgagcgtcagaccccgtagaaaagatcaaaggatcttcttgagatcctttttttctgcgcgtaatctgctgcttgcaaacaaaaaaaccaccgctaccagcggtggtttgtttgccggatcaagagctaccaactctttttccgaaggtaactggcttcagcagagcgcagataccaaatactgtccttctagtgtagccgtagttaggccaccacttcaagaactctgtagcaccgcctacatacctcgctctgctaatcctgttaccagtggctgctgccagtggcgataagtcgtgtcttaccgggttggactcaagacgatagttaccggataaggcgcagcggtcgggctgaacggggggttcgtgcacacagcccagcttggagcgaacgacctacaccgaactgagatacctacagcgtgagctatgagaaagcgccacgcttcccgaagggagaaaggcggacaggtatccggtaagcggcagggtcggaacaggagagcgcacgagggagcttccagggggaaacgcctggtatctttatagtcctgtcgggtttcgccacctctgacttgagcgtcgatttttgtgatgctcgtcaggggggcggagcctatggaaaaacgccagcaacgcggcctttttacggttcctggccttttgctggccttttgctcacatgttctttcctgcgttatcccctgattctgtggataaccgtattaccgcctttgagtgagctgataccgctcgccgcagccgaacgaccgagcgcagcgagtcagtgagcgaggaagcggaagagcgcccaatacgcaaaccgcctctccccgcgcgttggccgattcattaatgcagctggcacgacaggtttcccgactggaaagcgggcagtgagcgcaacgcaattaatgtgagttagctcactcattaggcaccccaggctttacactttatgcttccggctcgtatgttgtgtggaattgtgagcggataacaatttcacacaggaaacagcatatgcaaacaagcattactctgacatccaacgcatccggtacgtttgacggttactattacgaactctggaaggatactggcaatacaacaatgacggtctacactcaaggtcgcttttcctgccagtggtcgaacatcaataacgcgttgtttaggaccgggaagaaatacaaccagaattggcagtctcttggcacaatccggatcacgtactctgcgacttacaacccaaacgggaactcctacttgtgtatctatggctggtctaccaacccattggtcgagttctacatcgttgagtcctgggggaactggagaccgcctggtgcctgcgttaagaatgattcgctgattttcactgatcgggggctggtcactgcggcggagctcgctgtcggggttcctgaggagcatgcggccttcacggaggttggcgtggacacatccactgggagggcgaccacgaacgctgtgtacaatggcgggaggagcccaaccaagagggctaggctcgccctgggctacgagctggaggcgacgccagagcacccaatcagggttctcagggacgatgcgctggcttgggtgcggatggacgagctccatgtcggcgatcgcgttgctctgaggaggggctcggaagtgtgggggcgctccagcctgccagaggcgttcaggtgggtcaagcctaagtacgccgcgaacctcaagctgccaaagggcctcgtgctggacgaggtcgctgctgaggcttgcggcctcctggtctccgaggggaccctcacgaagcgcctggttacagagttcactaacgccgacgcggataatgtgggcttcatctcgcgctgggcggcttctatcggcattgacctctcaaggaacgggagcgattcgattcagtacctcctgtgctccgtggtcctcagggagtggctggcttggctcggcctggactacaccagggccgctgggaagtgcatcccgcgggcggtccgcttcggcgggagggacattatgagggcgttcctcaggggcctgttcgacggggatgcttctgtcgatcccctcaagggcgttatcgagttctgcacagcctcagagaggatggcgcgggaggtccaggttgctctcctgggcctcgggattctggcttctcgccactcaaggactgtggccggctacgagcagctgtactggcgggtgaccgtcaacgacgtggccacgttcgagagggaggtcggcttctcgtctaactggaataggctcaggctgagggaggctgtggcgcgggcagagggcaggtgccggaacccgaatgttgatacagtgcccatcaacgggctcgtcgagaggctgtacaggactgcccagaagcagctctcctggtcatcccaggagggccgcatcttcgggaattacgtgcacggcgagcatgctccaagcagggctgctctggagaggatggtccagcgctgggggtcggagtgcccaaccgagtgcctccctatcgaggccttcctggagctgcctgttgccttcctgtccgtggagagcattgaggacggcgaggcggatgtcgtggatctctcagttccagagacgcatgagttcgttgctaatggggtcgtttgccataatacgtccctgggccaagtgacaatcgatggcgggacctacgacatctataggacgacacgcgtcaaccagccttccattgtggggacagccacgttcgatcagtactggagcgtgcgcacctctaagcggacttcaggaacagtgaccgtgaccgatcacttccgcgcctgggcgaaccggggcctgaacctcggcacaatagaccaaattacattgtgcgtggagggttaccaaagctctggatcagccaacatcacccagaacaccttctctcagggctcttcttccggcagttcgggtggctcatccggctccacaacgactactcgcatcgagtgtgagaacatgtccttgtccggaccctacgttagcaggatcaccaatccctttaatggtattgcgctgtacgccaacggagacacagcccgcgctaccgttaacttccccgcaagtcgcaactacaatttccgcctgcggggttgcggcaacaacaataatcttgcccgtgtggacctgaggatcgacggacggaccgtcgggaccttttattaccagggcacatacccctgggaggccccaattgacaatgtttatgtcagtgcggggagtcatacagtcgaaatcactgttactgcggataacggcacatgggacgtgtatgccgactacctggtgatacagtgactcgagggggggcccggtacccaattcgccctatagtgagtcgtattacaattcactggccgtcgttttacaacgtcgtgactgggaaaaccctggcgttacccaacttaatcgccttgcagcacatccccctttcgccagctggcgtaatagcgaagaggcccgcaccgatcgcccttcccaacagttgcgcagcctgaatggcgaatggaaattgtaagcgttaatattttgttaaaattcgcgttaaatttttgttaaatcagctcattttttaaccaataggccgaaatcggcaaaatcccttataaatcaaaagaatagaccgagatagggttgagtgttgttccagtttggaacaagagtccactattaaagaacgtggactccaacgtcaaagggcgaaaaaccgtctatcagggcgatggcccactacgtgaaccatcaccctaatcaagttttttggggtcgaggtgccgtaaagcactaaatcggaaccctaaagggagcccccgatttagagcttgacggggaaagccggcgaacgtggcgagaaaggaagggaagaaagcgaaaggagcgggcgctagggcgctggcaagtgtagcggtcacgctgcgcgtaaccaccacacccgccgcgcttaatgcgccgctacagggcgcgtcaggtg

SEQ ID NO: 3228 - DNA, 5105 bp, Artificial Sequence
  Synthetic Construct, AT-71 intein modified protein encoding nucleic acids in pBluescript
gcacttttcggggaaatgtgcgcggaacccctatttgtttatttttctaaatacattcaaatatgtatccgctcatgagacaataaccctgataaatgcttcaataatattgaaaaaggaagagtatgagtattcaacatttccgtgtcgcccttattcccttttttgcggcattttgccttcctgtttttgctcacccagaaacgctggtgaaagtaaaagatgctgaagatcagttgggtgcacgagtgggttacatcgaactggatctcaacagcggtaagatccttgagagttttcgccccgaagaacgttttccaatgatgagcacttttaaagttctgctatgtggcgcggtattatcccgtattgacgccgggcaagagcaactcggtcgccgcatacactattctcagaatgacttggttgagtactcaccagtcacagaaaagcatcttacggatggcatgacagtaagagaattatgcagtgctgccataaccatgagtgataacactgcggccaacttacttctgacaacgatcggaggaccgaaggagctaaccgcttttttgcacaacatgggggatcatgtaactcgccttgatcgttgggaaccggagctgaatgaagccataccaaacgacgagcgtgacaccacgatgcctgtagcaatggcaacaacgttgcgcaaactattaactggcgaactacttactctagcttcccggcaacaattaatagactggatggaggcggataaagttgcaggaccacttctgcgctcggcccttccggctggctggtttattgctgataaatctggagccggtgagcgtgggtctcgcggtatcattgcagcactggggccagatggtaagccctcccgtatcgtagttatctacacgacggggagtcaggcaactatggatgaacgaaatagacagatcgctgagataggtgcctcactgattaagcattggtaactgtcagaccaagtttactcatatatactttagattgatttaaaacttcatttttaatttaaaaggatctaggtgaagatcctttttgataatctcatgaccaaaatcccttaacgtgagttttcgttccactgagcgtcagaccccgtagaaaagatcaaaggatcttcttgagatcctttttttctgcgcgtaatctgctgcttgcaaacaaaaaaaccaccgctaccagcggtggtttgtttgccggatcaagagctaccaactctttttccgaaggtaactggcttcagcagagcgcagataccaaatactgtccttctagtgtagccgtagttaggccaccacttcaagaactctgtagcaccgcctacatacctcgctctgctaatcctgttaccagtggctgctgccagtggcgataagtcgtgtcttaccgggttggactcaagacgatagttaccggataaggcgcagcggtcgggctgaacggggggttcgtgcacacagcccagcttggagcgaacgacctacaccgaactgagatacctacagcgtgagctatgagaaagcgccacgcttcccgaagggagaaaggcggacaggtatccggtaagcggcagggtcggaacaggagagcgcacgagggagcttccagggggaaacgcctggtatctttatagtcctgtcgggtttcgccacctctgacttgagcgtcgatttttgtgatgctcgtcaggggggcggagcctatggaaaaacgccagcaacgcggcctttttacggttcctggccttttgctggccttttgctcacatgttctttcctgcgttatcccctgattctgtggataaccgtattaccgcctttgagtgagctgataccgctcgccgcagccgaacgaccgagcgcagcgagtcagtgagcgaggaagcggaagagcgcccaatacgcaaaccgcctctccccgcgcgttggccgattcattaatgcagctggcacgacaggtttcccgactggaaagcgggcagtgagcgcaacgcaattaatgtgagttagctcactcattaggcaccccaggctttacactttatgcttccggctcgtatgttgtgtggaattgtgagcggataacaatttcacacaggaaacagcatatgcaaacaagcattactctgacatccaacgcatccggtacgtttgacggttactattacgaactctggaaggatactggcaatacaacaatgacggtctacactcaaggtcgcttttcctgccagtggtcgaacatcaataacgcgttgtttaggaccgggaagaaatacaaccagaattggcagtctcttggcacaatccggatcacgtactctgcgacttacaacccaaacgggaactcctacttgtgtatctatggctggtctaccaacccattggtcgagttctacatcgttgagtcctgggggaactggagaccgcctggtgcctgcctcccagcctcaacgcggattctcagggcggacactggcgcggagtcaactctcggggagctgctggcctcgggggagcagcctctcgtttggtccctggacgagaggatgaggatggtcgctaggccgatggttaaggtgttcccctcgggcaggaaggaggtgttcaggctgaggctcgcttctgggagggaggtcgaggctaccggcaaccacccgttcctcacggtggacgggtggatcccactggataggctcacagtcggcgacaggctggctactccaaggagcgtgccagagcccgtccacacagagaggatggccgatgcggaggtggtcctcctggctcacatgatcggcgacgggtcgtgcgtccgcaggcagcccgttcgctacgcctccattgacgagcagaatctcgctgcggtgagcgaggctgctgagcatttcggcgtgacggcggtcagggacgattacgctgctgcccgcgtcaccacgctgaggctcccagctccttacaggctgtcacgcggcaagaggaacccaattgcggcttggctcgatgagctgggcctcttcgggctgaggtcccacgagaagttcatcccacggcgcgtcttcgctctccctaatgaccaggttgccctgttcctccgccatctgtgggccacagatggctccgtgaggtgggacagcacttacaggcaggcgcgcgtctactacacatccactagcaggcggctcatcgacgatgtggcgcagctcctgctcaggctgggcgttcacgggcgcattcgcagggtgaccaagccagggtacagggacgcttggcatctcaccatcgacggcgctgataaccagacggtgttcctgagggatgtcggcgttcacggggcccggggcgacgctgctcaggtggctctggctgagctggagccactggtccggaacaccaatgttgacacggtgcctaacgaggtttggaatcaggtgcgccacctgctcgcgacaaagaacattactcatcgcgagttctcggctgccatggggtctaggttctgcggctcaaccatgtggaagaggtcgccctctcgctcaaggctcgcccgcgtcgctgctgttctggacgatgcggatatcgagatgtacgctaccaatgacgtgttctgggataagatcgtcgagattacgtctctcggcgagcaggacgtgtacgatggcactgttccaggcactcataacttcgttgctcagtctatctctgttcataatacgtccctgggccaagtgacaatcgatggcgggacctacgacatctataggacgacacgcgtcaaccagccttccattgtggggacagccacgttcgatcagtactggagcgtgcgcacctctaagcggacttcaggaacagtgaccgtgaccgatcacttccgcgcctgggcgaaccggggcctgaacctcggcacaatagaccaaattacattgtgcgtggagggttaccaaagctctggatcagccaacatcacccagaacaccttctctcagggctcttcttccggcagttcgggtggctcatccggctccacaacgactactcgcatcgagtgtgagaacatgtccttgtccggaccctacgttagcaggatcaccaatccctttaatggtattgcgctgtacgccaacggagacacagcccgcgctaccgttaacttccccgcaagtcgcaactacaatttccgcctgcggggttgcggcaacaacaataatcttgcccgtgtggacctgaggatcgacggacggaccgtcgggaccttttattaccagggcacatacccctgggaggccccaattgacaatgtttatgtcagtgcggggagtcatacagtcgaaatcactgttactgcggataacggcacatgggacgtgtatgccgactacctggtgatacagtgactcgagggggggcccggtacccaattcgccctatagtgagtcgtattacaattcactggccgtcgttttacaacgtcgtgactgggaaaaccctggcgttacccaacttaatcgccttgcagcacatccccctttcgccagctggcgtaatagcgaagaggcccgcaccgatcgcccttcccaacagttgcgcagcctgaatggcgaatggaaattgtaagcgttaatattttgttaaaattcgcgttaaatttttgttaaatcagctcattttttaaccaataggccgaaatcggcaaaatcccttataaatcaaaagaatagaccgagatagggttgagtgttgttccagtttggaacaagagtccactattaaagaacgtggactccaacgtcaaagggcgaaaaaccgtctatcagggcgatggcccactacgtgaaccatcaccctaatcaagttttttggggtcgaggtgccgtaaagcactaaatcggaaccctaaagggagcccccgatttagagcttgacggggaaagccggcgaacgtggcgagaaaggaagggaagaaagcgaaaggagcgggcgctagggcgctggcaagtgtagcggtcacgctgcgcgtaaccaccacacccgccgcgcttaatgcgccgctacagggcgcgtcaggtg

SEQ ID NO: 3229 - DNA, 4769 bp, Artificial Sequence
  Synthetic Construct, AT-72 intein modified protein encoding nucleic acids in pBluescript
gcacttttcggggaaatgtgcgcggaacccctatttgtttatttttctaaatacattcaaatatgtatccgctcatgagacaataaccctgataaatgcttcaataatattgaaaaaggaagagtatgagtattcaacatttccgtgtcgcccttattcccttttttgcggcattttgccttcctgtttttgctcacccagaaacgctggtgaaagtaaaagatgctgaagatcagttgggtgcacgagtgggttacatcgaactggatctcaacagcggtaagatccttgagagttttcgccccgaagaacgttttccaatgatgagcacttttaaagttctgctatgtggcgcggtattatcccgtattgacgccgggcaagagcaactcggtcgccgcatacactattctcagaatgacttggttgagtactcaccagtcacagaaaagcatcttacggatggcatgacagtaagagaattatgcagtgctgccataaccatgagtgataacactgcggccaacttacttctgacaacgatcggaggaccgaaggagctaaccgcttttttgcacaacatgggggatcatgtaactcgccttgatcgttgggaaccggagctgaatgaagccataccaaacgacgagcgtgacaccacgatgcctgtagcaatggcaacaacgttgcgcaaactattaactggcgaactacttactctagcttcccggcaacaattaatagactggatggaggcggataaagttgcaggaccacttctgcgctcggcccttccggctggctggtttattgctgataaatctggagccggtgagcgtgggtctcgcggtatcattgcagcactggggccagatggtaagccctcccgtatcgtagttatctacacgacggggagtcaggcaactatggatgaacgaaatagacagatcgctgagataggtgcctcactgattaagcattggtaactgtcagaccaagtttactcatatatactttagattgatttaaaacttcatttttaatttaaaaggatctaggtgaagatcctttttgataatctcatgaccaaaatcccttaacgtgagttttcgttccactgagcgtcagaccccgtagaaaagatcaaaggatcttcttgagatcctttttttctgcgcgtaatctgctgcttgcaaacaaaaaaaccaccgctaccagcggtggtttgtttgccggatcaagagctaccaactctttttccgaaggtaactggcttcagcagagcgcagataccaaatactgtccttctagtgtagccgtagttaggccaccacttcaagaactctgtagcaccgcctacatacctcgctctgctaatcctgttaccagtggctgctgccagtggcgataagtcgtgtcttaccgggttggactcaagacgatagttaccggataaggcgcagcggtcgggctgaacggggggttcgtgcacacagcccagcttggagcgaacgacctacaccgaactgagatacctacagcgtgagctatgagaaagcgccacgcttcccgaagggagaaaggcggacaggtatccggtaagcggcagggtcggaacaggagagcgcacgagggagcttccagggggaaacgcctggtatctttatagtcctgtcgggtttcgccacctctgacttgagcgtcgatttttgtgatgctcgtcaggggggcggagcctatggaaaaacgccagcaacgcggcctttttacggttcctggccttttgctggccttttgctcacatgttctttcctgcgttatcccctgattctgtggataaccgtattaccgcctttgagtgagctgataccgctcgccgcagccgaacgaccgagcgcagcgagtcagtgagcgaggaagcggaagagcgcccaatacgcaaaccgcctctccccgcgcgttggccgattcattaatgcagctggcacgacaggtttcccgactggaaagcgggcagtgagcgcaacgcaattaatgtgagttagctcactcattaggcaccccaggctttacactttatgcttccggctcgtatgttgtgtggaattgtgagcggataacaatttcacacaggaaacagcatatgcaaacaagcattactctgacatccaacgcatccggtacgtttgacggttactattacgaactctggaaggatactggcaatacaacaatgacggtctacactcaaggtcgcttttcctgccagtggtcgaacatcaataacgcgttgtttaggaccgggaagaaatacaaccagaattggcagtctcttggcacaatccggatcacgtactctgcgacttacaacccaaacgggaactcctacttgtgtatctatggctggtctaccaacccattggtcgagttctacatcgttgagtcctgggggaactggagaccgcctggtgcctgcttccctgcgggcacagtcgtttcggggccatcggcggaggcggctacaaggcgctggttcgagggggagctggtcgttttcactaccgctagcgggaagcagctctcgctgaccggcaaccacccagtgctcacgcgcggcgggtgggtccccgccaacctcctgaatgagggcgacgaggtggtcaggtcgacaaggccacagggcgctactccactcgttgtgcctgaccaccatcaggtgccggcgctgatcgaggatgtctgggggagcttcgctgttaatggcctccacagggtgccagctgctcctgaggacttccatggggatggccagaggggggaggtcgacatcgttggcccagatcggaccctgtggtgcggccacgacgctgctattgctcagcagcgggagcagcagttcttcacccgcaggacggagtccagcggcctcctggtggctgagtccgtcgctcagctcgttgacctgtggcaggctccacactctggctcgtctatcgggcgctcaggcctcccattcgctctgattggcgggcatggcgggggccctgtcgagaggggcctcacggttgctgctgggggctacccaggcctccatgaggccctggcggactaccggcccggcgatgctgtgctgccaccacagggggtcttcgctggctcatccgagatcgggggcgacgattgcgtgattggcaaggtcgactccacacgctgggatgctccagctctccccttcctggtggaggggagggcgggctacgctagcagggggaaggagctcttcgaccggctgactggccaggtcgagctcgatcgcatcgttattctgcggcgcgtgcagtggtccggccacgtcttctcgctcacaagctcagaggggtggcatacgggcaactcgctcatcgtctctaatacgtccctgggccaagtgacaatcgatggcgggacctacgacatctataggacgacacgcgtcaaccagccttccattgtggggacagccacgttcgatcagtactggagcgtgcgcacctctaagcggacttcaggaacagtgaccgtgaccgatcacttccgcgcctgggcgaaccggggcctgaacctcggcacaatagaccaaattacattgtgcgtggagggttaccaaagctctggatcagccaacatcacccagaacaccttctctcagggctcttcttccggcagttcgggtggctcatccggctccacaacgactactcgcatcgagtgtgagaacatgtccttgtccggaccctacgttagcaggatcaccaatccctttaatggtattgcgctgtacgccaacggagacacagcccgcgctaccgttaacttccccgcaagtcgcaactacaatttccgcctgcggggttgcggcaacaacaataatcttgcccgtgtggacctgaggatcgacggacggaccgtcgggaccttttattaccagggcacatacccctgggaggccccaattgacaatgtttatgtcagtgcggggagtcatacagtcgaaatcactgttactgcggataacggcacatgggacgtgtatgccgactacctggtgatacagtgactcgagggggggcccggtacccaattcgccctatagtgagtcgtattacaattcactggccgtcgttttacaacgtcgtgactgggaaaaccctggcgttacccaacttaatcgccttgcagcacatccccctttcgccagctggcgtaatagcgaagaggcccgcaccgatcgcccttcccaacagttgcgcagcctgaatggcgaatggaaattgtaagcgttaatattttgttaaaattcgcgttaaatttttgttaaatcagctcattttttaaccaataggccgaaatcggcaaaatcccttataaatcaaaagaatagaccgagatagggttgagtgttgttccagtttggaacaagagtccactattaaagaacgtggactccaacgtcaaagggcgaaaaaccgtctatcagggcgatggcccactacgtgaaccatcaccctaatcaagttttttggggtcgaggtgccgtaaagcactaaatcggaaccctaaagggagcccccgatttagagcttgacggggaaagccggcgaacgtggcgagaaaggaagggaagaaagcgaaaggagcgggcgctagggcgctggcaagtgtagcggtcacgctgcgcgtaaccaccacacccgccgcgcttaatgcgccgctacagggcgcgtcaggtg

SEQ ID NO: 3230 - DNA, 5057 bp, Artificial Sequence
  Synthetic Construct, AT-73 intein modified protein encoding nucleic acids in pBluescript
gcacttttcggggaaatgtgcgcggaacccctatttgtttatttttctaaatacattcaaatatgtatccgctcatgagacaataaccctgataaatgcttcaataatattgaaaaaggaagagtatgagtattcaacatttccgtgtcgcccttattcccttttttgcggcattttgccttcctgtttttgctcacccagaaacgctggtgaaagtaaaagatgctgaagatcagttgggtgcacgagtgggttacatcgaactggatctcaacagcggtaagatccttgagagttttcgccccgaagaacgttttccaatgatgagcacttttaaagttctgctatgtggcgcggtattatcccgtattgacgccgggcaagagcaactcggtcgccgcatacactattctcagaatgacttggttgagtactcaccagtcacagaaaagcatcttacggatggcatgacagtaagagaattatgcagtgctgccataaccatgagtgataacactgcggccaacttacttctgacaacgatcggaggaccgaaggagctaaccgcttttttgcacaacatgggggatcatgtaactcgccttgatcgttgggaaccggagctgaatgaagccataccaaacgacgagcgtgacaccacgatgcctgtagcaatggcaacaacgttgcgcaaactattaactggcgaactacttactctagcttcccggcaacaattaatagactggatggaggcggataaagttgcaggaccacttctgcgctcggcccttccggctggctggtttattgctgataaatctggagccggtgagcgtgggtctcgcggtatcattgcagcactggggccagatggtaagccctcccgtatcgtagttatctacacgacggggagtcaggcaactatggatgaacgaaatagacagatcgctgagataggtgcctcactgattaagcattggtaactgtcagaccaagtttactcatatatactttagattgatttaaaacttcatttttaatttaaaaggatctaggtgaagatcctttttgataatctcatgaccaaaatcccttaacgtgagttttcgttccactgagcgtcagaccccgtagaaaagatcaaaggatcttcttgagatcctttttttctgcgcgtaatctgctgcttgcaaacaaaaaaaccaccgctaccagcggtggtttgtttgccggatcaagagctaccaactctttttccgaaggtaactggcttcagcagagcgcagataccaaatactgtccttctagtgtagccgtagttaggccaccacttcaagaactctgtagcaccgcctacatacctcgctctgctaatcctgttaccagtggctgctgccagtggcgataagtcgtgtcttaccgggttggactcaagacgatagttaccggataaggcgcagcggtcgggctgaacggggggttcgtgcacacagcccagcttggagcgaacgacctacaccgaactgagatacctacagcgtgagctatgagaaagcgccacgcttcccgaagggagaaaggcggacaggtatccggtaagcggcagggtcggaacaggagagcgcacgagggagcttccagggggaaacgcctggtatctttatagtcctgtcgggtttcgccacctctgacttgagcgtcgatttttgtgatgctcgtcaggggggcggagcctatggaaaaacgccagcaacgcggcctttttacggttcctggccttttgctggccttttgctcacatgttctttcctgcgttatcccctgattctgtggataaccgtattaccgcctttgagtgagctgataccgctcgccgcagccgaacgaccgagcgcagcgagtcagtgagcgaggaagcggaagagcgcccaatacgcaaaccgcctctccccgcgcgttggccgattcattaatgcagctggcacgacaggtttcccgactggaaagcgggcagtgagcgcaacgcaattaatgtgagttagctcactcattaggcaccccaggctttacactttatgcttccggctcgtatgttgtgtggaattgtgagcggataacaatttcacacaggaaacagcatatgcaaacaagcattactctgacatccaacgcatccggtacgtttgacggttactattacgaactctggaaggatactggcaatacaacaatgacggtctacactcaaggtcgcttttcctgccagtggtcgaacatcaataacgcgttgtttaggaccgggaagaaatacaaccagaattggcagtctcttggcacaatccggatcacgtactctgcgacttacaacccaaacgggaactcctacttgtgtatctatggctggtctaccaacccattggtcgagttctacatcgttgagtcctgggggaactggagaccgcctggtgcctgcttccctgcgggcacaccagtggacactatcgatgggccaaagcctattgagtcgctgcgggctggggatcgggttctctcgcatgacggctcgtacgccacggtggagaagctgatcgagaacacaaatgatcagccactcgtctccattagccacttcggccataaggagcctatcaggtgcacgccggagcaccccattctggtgtggacggaccgggatgtcgagacactcatcgacggcgatggggctgacccgttcaacggcttcgtgtggctggctgctcaggacgtccatccatccgatttcattgttgctactgctccactggagacccgcgagaggagggtgttcgacctcatgaatcacgtcggcgaggggacgtacgaggaggttgacggcctgatccggaaggtgaacacagatgcgaggcatcggaataagcagcgccacaggcagggcttcgtcgctgttacccgctacgtggaggagagctacgacctcggcctgatcctcgggtggtacctcgccgagggccatgtctcgaagcgctctggggttgaggatgtgaggccaacgggcgtgcatttcacactgggggctaacgagattgagaggcacgtcgagctcggcatggccttcaagcaggtcttcggcgttgacctggtgctccacactaaccattcagatcactccaccaggatggtttgcaattctaagatcgtggctagcctcctgctctcgctggctggcacggggtactcaacaaagcggctcgcgcacgaggtcatgaccgctgacgaggatttccagaggggcctgctcgtcgggctcttccgcggcgacgggtgcaccacgacaggcgggatggtcctggacctcgttaaccaggagctgatcgatcaggtccagctgctcctgaggaggctcggcattgttagcgtggtccgcacgtacacaaaccaggctggcaatccgactgggcaggtgttcgtcccaggcctgcctgggaccaacgaggagttcatcttcgacgtggataagaacctccagaattacactggcaggaaggggaccaagcggactacctaccaggttgtgcatggccgccacgtctacgggattcgggctgttgagaggactggcgagaccccaaggcaggtctacaatctgcatgtggagggcactcatacttacactattaggggggctgtggttcataacacgtccctgggccaagtgacaatcgatggcgggacctacgacatctataggacgacacgcgtcaaccagccttccattgtggggacagccacgttcgatcagtactggagcgtgcgcacctctaagcggacttcaggaacagtgaccgtgaccgatcacttccgcgcctgggcgaaccggggcctgaacctcggcacaatagaccaaattacattgtgcgtggagggttaccaaagctctggatcagccaacatcacccagaacaccttctctcagggctcttcttccggcagttcgggtggctcatccggctccacaacgactactcgcatcgagtgtgagaacatgtccttgtccggaccctacgttagcaggatcaccaatccctttaatggtattgcgctgtacgccaacggagacacagcccgcgctaccgttaacttccccgcaagtcgcaactacaatttccgcctgcggggttgcggcaacaacaataatcttgcccgtgtggacctgaggatcgacggacggaccgtcgggaccttttattaccagggcacatacccctgggaggccccaattgacaatgtttatgtcagtgcggggagtcatacagtcgaaatcactgttactgcggataacggcacatgggacgtgtatgccgactacctggtgatacagtgactcgagggggggcccggtacccaattcgccctatagtgagtcgtattacaattcactggccgtcgttttacaacgtcgtgactgggaaaaccctggcgttacccaacttaatcgccttgcagcacatccccctttcgccagctggcgtaatagcgaagaggcccgcaccgatcgcccttcccaacagttgcgcagcctgaatggcgaatggaaattgtaagcgttaatattttgttaaaattcgcgttaaatttttgttaaatcagctcattttttaaccaataggccgaaatcggcaaaatcccttataaatcaaaagaatagaccgagatagggttgagtgttgttccagtttggaacaagagtccactattaaagaacgtggactccaacgtcaaagggcgaaaaaccgtctatcagggcgatggcccactacgtgaaccatcaccctaatcaagttttttggggtcgaggtgccgtaaagcactaaatcggaaccctaaagggagcccccgatttagagcttgacggggaaagccggcgaacgtggcgagaaaggaagggaagaaagcgaaaggagcgggcgctagggcgctggcaagtgtagcggtcacgctgcgcgtaaccaccacacccgccgcgcttaatgcgccgctacagggcgcgtcaggtg

SEQ ID NO: 3231 - DNA, 4847 bp, Artificial Sequence
  Synthetic Construct, AT-74 intein modified protein encoding nucleic acids in pBluescript
gcacttttcggggaaatgtgcgcggaacccctatttgtttatttttctaaatacattcaaatatgtatccgctcatgagacaataaccctgataaatgcttcaataatattgaaaaaggaagagtatgagtattcaacatttccgtgtcgcccttattcccttttttgcggcattttgccttcctgtttttgctcacccagaaacgctggtgaaagtaaaagatgctgaagatcagttgggtgcacgagtgggttacatcgaactggatctcaacagcggtaagatccttgagagttttcgccccgaagaacgttttccaatgatgagcacttttaaagttctgctatgtggcgcggtattatcccgtattgacgccgggcaagagcaactcggtcgccgcatacactattctcagaatgacttggttgagtactcaccagtcacagaaaagcatcttacggatggcatgacagtaagagaattatgcagtgctgccataaccatgagtgataacactgcggccaacttacttctgacaacgatcggaggaccgaaggagctaaccgcttttttgcacaacatgggggatcatgtaactcgccttgatcgttgggaaccggagctgaatgaagccataccaaacgacgagcgtgacaccacgatgcctgtagcaatggcaacaacgttgcgcaaactattaactggcgaactacttactctagcttcccggcaacaattaatagactggatggaggcggataaagttgcaggaccacttctgcgctcggcccttccggctggctggtttattgctgataaatctggagccggtgagcgtgggtctcgcggtatcattgcagcactggggccagatggtaagccctcccgtatcgtagttatctacacgacggggagtcaggcaactatggatgaacgaaatagacagatcgctgagataggtgcctcactgattaagcattggtaactgtcagaccaagtttactcatatatactttagattgatttaaaacttcatttttaatttaaaaggatctaggtgaagatcctttttgataatctcatgaccaaaatcccttaacgtgagttttcgttccactgagcgtcagaccccgtagaaaagatcaaaggatcttcttgagatcctttttttctgcgcgtaatctgctgcttgcaaacaaaaaaaccaccgctaccagcggtggtttgtttgccggatcaagagctaccaactctttttccgaaggtaactggcttcagcagagcgcagataccaaatactgtccttctagtgtagccgtagttaggccaccacttcaagaactctgtagcaccgcctacatacctcgctctgctaatcctgttaccagtggctgctgccagtggcgataagtcgtgtcttaccgggttggactcaagacgatagttaccggataaggcgcagcggtcgggctgaacggggggttcgtgcacacagcccagcttggagcgaacgacctacaccgaactgagatacctacagcgtgagctatgagaaagcgccacgcttcccgaagggagaaaggcggacaggtatccggtaagcggcagggtcggaacaggagagcgcacgagggagcttccagggggaaacgcctggtatctttatagtcctgtcgggtttcgccacctctgacttgagcgtcgatttttgtgatgctcgtcaggggggcggagcctatggaaaaacgccagcaacgcggcctttttacggttcctggccttttgctggccttttgctcacatgttctttcctgcgttatcccctgattctgtggataaccgtattaccgcctttgagtgagctgataccgctcgccgcagccgaacgaccgagcgcagcgagtcagtgagcgaggaagcggaagagcgcccaatacgcaaaccgcctctccccgcgcgttggccgattcattaatgcagctggcacgacaggtttcccgactggaaagcgggcagtgagcgcaacgcaattaatgtgagttagctcactcattaggcaccccaggctttacactttatgcttccggctcgtatgttgtgtggaattgtgagcggataacaatttcacacaggaaacagcatatgcaaacaagcattactctgacatccaacgcatccggtacgtttgacggttactattacgaactctggaaggatactggcaatacaacaatgacggtctacactcaaggtcgcttttcctgccagtggtcgaacatcaataacgcgttgtttaggaccgggaagaaatacaaccagaattggcagtctcttggcacaatccggatcacgtactctgcgacttacaacccaaacgggaactcctacttgtgtatctatggctggtctaccaacccattggtcgagttctacatcgttgagtcctgggggaactggagaccgcctggtgcctgcgtggacggggacacaagcgttactctcgcctcgggggatgagaagcctattcgggacatcgtggagtcaacactggaggatccgacagagatcagcgacggcttctaccaggagtcggacattgatgtgctcaccacggatggcggggctgtcgctccaggcagggctaccaaggtttggaagcggcaggctcccgagaagatgtacaggatccggacagagtccggcagggagctggaggtcactccaagccaccccctgttcgtgcagtcagagggcgggctctccccactggtcgctgacgatctcagcgagaacgacttcgtggctgtcccgagggcgctgccagctgacgatggcgacgatttcgggcagcatgtggacgatctgggctccgtcaccgctcggaagacggctgacgctgaggccgtgcgctccgaggacgccgcgacaactccagatgttatccctaacgtgggcgaccagctccgcaggattcgcacctcgctcaggctgtctcagcacgactgcggcctgccaaggtcgacgtaccagcagtacgagaggggggaccggaatccttcgcgctctaggctccagacagtcctgactgcgttcgagcggcgcatcgagcagctctccagcctgtctgacagggtggacgatggcgactcagatgccattgctgccgcgcgggacgagctcaatccatcacaggcttccctggctagcggcatggatgctaccaggacggctatcggggacgatgagaggacggaggctaggccagacggcggggcggttgctgatgctgagagggctgtggctgacgctctctgcagggcgctggctgtcgccgacgatgttgagaggctcaggtcgctggctgacggcgatatcgggtgggacaggatcgattctattgagccagtcgagcctgaggacgagtgggtttacgatctggaggtggagagcacacactcatacctctctaatgatgttgtttcgcataatacgtccctgggccaagtgacaatcgatggcgggacctacgacatctataggacgacacgcgtcaaccagccttccattgtggggacagccacgttcgatcagtactggagcgtgcgcacctctaagcggacttcaggaacagtgaccgtgaccgatcacttccgcgcctgggcgaaccggggcctgaacctcggcacaatagaccaaattacattgtgcgtggagggttaccaaagctctggatcagccaacatcacccagaacaccttctctcagggctcttcttccggcagttcgggtggctcatccggctccacaacgactactcgcatcgagtgtgagaacatgtccttgtccggaccctacgttagcaggatcaccaatccctttaatggtattgcgctgtacgccaacggagacacagcccgcgctaccgttaacttccccgcaagtcgcaactacaatttccgcctgcggggttgcggcaacaacaataatcttgcccgtgtggacctgaggatcgacggacggaccgtcgggaccttttattaccagggcacatacccctgggaggccccaattgacaatgtttatgtcagtgcggggagtcatacagtcgaaatcactgttactgcggataacggcacatgggacgtgtatgccgactacctggtgatacagtgactcgagggggggcccggtacccaattcgccctatagtgagtcgtattacaattcactggccgtcgttttacaacgtcgtgactgggaaaaccctggcgttacccaacttaatcgccttgcagcacatccccctttcgccagctggcgtaatagcgaagaggcccgcaccgatcgcccttcccaacagttgcgcagcctgaatggcgaatggaaattgtaagcgttaatattttgttaaaattcgcgttaaatttttgttaaatcagctcattttttaaccaataggccgaaatcggcaaaatcccttataaatcaaaagaatagaccgagatagggttgagtgttgttccagtttggaacaagagtccactattaaagaacgtggactccaacgtcaaagggcgaaaaaccgtctatcagggcgatggcccactacgtgaaccatcaccctaatcaagttttttggggtcgaggtgccgtaaagcactaaatcggaaccctaaagggagcccccgatttagagcttgacggggaaagccggcgaacgtggcgagaaaggaagggaagaaagcgaaaggagcgggcgctagggcgctggcaagtgtagcggtcacgctgcgcgtaaccaccacacccgccgcgcttaatgcgccgctacagggcgcgtcaggtg

SEQ ID NO: 3232 - DNA, 5306 bp, Artificial Sequence
  Synthetic Construct, AT-75 intein modified protein encoding nucleic acids in pBluescript
gcacttttcggggaaatgtgcgcggaacccctatttgtttatttttctaaatacattcaaatatgtatccgctcatgagacaataaccctgataaatgcttcaataatattgaaaaaggaagagtatgagtattcaacatttccgtgtcgcccttattcccttttttgcggcattttgccttcctgtttttgctcacccagaaacgctggtgaaagtaaaagatgctgaagatcagttgggtgcacgagtgggttacatcgaactggatctcaacagcggtaagatccttgagagttttcgccccgaagaacgttttccaatgatgagcacttttaaagttctgctatgtggcgcggtattatcccgtattgacgccgggcaagagcaactcggtcgccgcatacactattctcagaatgacttggttgagtactcaccagtcacagaaaagcatcttacggatggcatgacagtaagagaattatgcagtgctgccataaccatgagtgataacactgcggccaacttacttctgacaacgatcggaggaccgaaggagctaaccgcttttttgcacaacatgggggatcatgtaactcgccttgatcgttgggaaccggagctgaatgaagccataccaaacgacgagcgtgacaccacgatgcctgtagcaatggcaacaacgttgcgcaaactattaactggcgaactacttactctagcttcccggcaacaattaatagactggatggaggcggataaagttgcaggaccacttctgcgctcggcccttccggctggctggtttattgctgataaatctggagccggtgagcgtgggtctcgcggtatcattgcagcactggggccagatggtaagccctcccgtatcgtagttatctacacgacggggagtcaggcaactatggatgaacgaaatagacagatcgctgagataggtgcctcactgattaagcattggtaactgtcagaccaagtttactcatatatactttagattgatttaaaacttcatttttaatttaaaaggatctaggtgaagatcctttttgataatctcatgaccaaaatcccttaacgtgagttttcgttccactgagcgtcagaccccgtagaaaagatcaaaggatcttcttgagatcctttttttctgcgcgtaatctgctgcttgcaaacaaaaaaaccaccgctaccagcggtggtttgtttgccggatcaagagctaccaactctttttccgaaggtaactggcttcagcagagcgcagataccaaatactgtccttctagtgtagccgtagttaggccaccacttcaagaactctgtagcaccgcctacatacctcgctctgctaatcctgttaccagtggctgctgccagtggcgataagtcgtgtcttaccgggttggactcaagacgatagttaccggataaggcgcagcggtcgggctgaacggggggttcgtgcacacagcccagcttggagcgaacgacctacaccgaactgagatacctacagcgtgagctatgagaaagcgccacgcttcccgaagggagaaaggcggacaggtatccggtaagcggcagggtcggaacaggagagcgcacgagggagcttccagggggaaacgcctggtatctttatagtcctgtcgggtttcgccacctctgacttgagcgtcgatttttgtgatgctcgtcaggggggcggagcctatggaaaaacgccagcaacgcggcctttttacggttcctggccttttgctggccttttgctcacatgttctttcctgcgttatcccctgattctgtggataaccgtattaccgcctttgagtgagctgataccgctcgccgcagccgaacgaccgagcgcagcgagtcagtgagcgaggaagcggaagagcgcccaatacgcaaaccgcctctccccgcgcgttggccgattcattaatgcagctggcacgacaggtttcccgactggaaagcgggcagtgagcgcaacgcaattaatgtgagttagctcactcattaggcaccccaggctttacactttatgcttccggctcgtatgttgtgtggaattgtgagcggataacaatttcacacaggaaacagcatatgcaaacaagcattactctgacatccaacgcatccggtacgtttgacggttactattacgaactctggaaggatactggcaatacaacaatgacggtctacactcaaggtcgcttttcctgccagtggtcgaacatcaataacgcgttgtttaggaccgggaagaaatacaaccagaattggcagtctcttggcacaatccggatcacgtactctgcgacttacaacccaaacgggaactcctacttgtgtatctatggctggtctaccaacccattggtcgagttctacatcgttgagtcctgggggaactggagaccgcctggtgcctcaattcctgcggatgagcaggtcgtggttaggcgcaatggggagacggagctgacggagatcggccctctcgtggattcgctgatggattctcgcgagaccaggtcattcgacgatcacgaggtcacgctcgctccagacggcatcgaggttccctctctgtccagcgaggagaccgttgagtggaagccgattgaggaggtgtcacgccacgagacgccagacgagctcctgaggttcgagctggagtcgggcaggtctatcagggctaccaaggctcattctttcgtcacgcgccaggagaacgaggtggtcccagttgctggggaggagctggaggctggcgactggctccctgttgtggcttcgctggacgccaccgatacgcaggagacagtggacctgaggaagtacctcccggcgggcgattactggtacacttccgtgctcgccgacggcggggctgaggctgtcccaggcgggcccgaccagctgaggaacaagagggctgctctggaggctggcgagctcgctgagcacacagcttacccagtgcagggcactgtcgggctcccagagcagttccctctggacgaggagaccgggttcttcgtgggcgcttggctggctgagggcagcctcgcggatcattacgtttccatcagcaatgtggacgctgccttccagagccgcattaggtcgttcgccgagcgcttcgatctcacggtcaacgagtacgagaatgactccgggttcgcggctggctacgatatccggctgaacggcaccattctgagcgacttcctcagggctgcttgcacggacgatggcgagaagtcgatccccgggttcgctattggcgccaatgaggcgttcctcaaggggctcctgcagggctacttctccggcgatgggaacgtgggcaccaatgcgatcaggtcgtcttcaacaagcgacaggctgactgctggcgttgggctcctgctcgctaggttcgatgtgtacgccacactcggccagcaggaggactcacgcactctgagggtcccaaagaagcacgtttcccggttcgacaaccgcatcggcatggtcggggagaggggcgctgagctggaggctctcgctgagtcagctgactccgatgggccagacgctacagatcagatccctaacttcggcgatgctctggaggctgtggctgaggctgctgacatcccacagaggcaggtcaattcggccacgaagcggcagcgcattgacaggtctcggctggctaggctcgtggctgctgctgaggccgagctggacggggagcagtccgagctggatgcgctcaggcaggctgtcacaggcgacgtcgtttgggatcggatcgagtccattgagactgtggagagcgaccatgagtatgtgtacgatgtttcagtggaggggctggagactttcacaactgcggatggggtcgttactcataatacgtccctgggccaagtgacaatcgatggcgggacctacgacatctataggacgacacgcgtcaaccagccttccattgtggggacagccacgttcgatcagtactggagcgtgcgcacctctaagcggacttcaggaacagtgaccgtgaccgatcacttccgcgcctgggcgaaccggggcctgaacctcggcacaatagaccaaattacattgtgcgtggagggttaccaaagctctggatcagccaacatcacccagaacaccttctctcagggctcttcttccggcagttcgggtggctcatccggctccacaacgactactcgcatcgagtgtgagaacatgtccttgtccggaccctacgttagcaggatcaccaatccctttaatggtattgcgctgtacgccaacggagacacagcccgcgctaccgttaacttccccgcaagtcgcaactacaatttccgcctgcggggttgcggcaacaacaataatcttgcccgtgtggacctgaggatcgacggacggaccgtcgggaccttttattaccagggcacatacccctgggaggccccaattgacaatgtttatgtcagtgcggggagtcatacagtcgaaatcactgttactgcggataacggcacatgggacgtgtatgccgactacctggtgatacagtgactcgagggggggcccggtacccaattcgccctatagtgagtcgtattacaattcactggccgtcgttttacaacgtcgtgactgggaaaaccctggcgttacccaacttaatcgccttgcagcacatccccctttcgccagctggcgtaatagcgaagaggcccgcaccgatcgcccttcccaacagttgcgcagcctgaatggcgaatggaaattgtaagcgttaatattttgttaaaattcgcgttaaatttttgttaaatcagctcattttttaaccaataggccgaaatcggcaaaatcccttataaatcaaaagaatagaccgagatagggttgagtgttgttccagtttggaacaagagtccactattaaagaacgtggactccaacgtcaaagggcgaaaaaccgtctatcagggcgatggcccactacgtgaaccatcaccctaatcaagttttttggggtcgaggtgccgtaaagcactaaatcggaaccctaaagggagcccccgatttagagcttgacggggaaagccggcgaacgtggcgagaaaggaagggaagaaagcgaaaggagcgggcgctagggcgctggcaagtgtagcggtcacgctgcgcgtaaccaccacacccgccgcgcttaatgcgccgctacagggcgcgtcaggtg

SEQ ID NO: 3233 - DNA, 4796 bp, Artificial Sequence
  Synthetic Construct, AT-76 intein modified protein encoding nucleic acids in pBluescript
gcacttttcggggaaatgtgcgcggaacccctatttgtttatttttctaaatacattcaaatatgtatccgctcatgagacaataaccctgataaatgcttcaataatattgaaaaaggaagagtatgagtattcaacatttccgtgtcgcccttattcccttttttgcggcattttgccttcctgtttttgctcacccagaaacgctggtgaaagtaaaagatgctgaagatcagttgggtgcacgagtgggttacatcgaactggatctcaacagcggtaagatccttgagagttttcgccccgaagaacgttttccaatgatgagcacttttaaagttctgctatgtggcgcggtattatcccgtattgacgccgggcaagagcaactcggtcgccgcatacactattctcagaatgacttggttgagtactcaccagtcacagaaaagcatcttacggatggcatgacagtaagagaattatgcagtgctgccataaccatgagtgataacactgcggccaacttacttctgacaacgatcggaggaccgaaggagctaaccgcttttttgcacaacatgggggatcatgtaactcgccttgatcgttgggaaccggagctgaatgaagccataccaaacgacgagcgtgacaccacgatgcctgtagcaatggcaacaacgttgcgcaaactattaactggcgaactacttactctagcttcccggcaacaattaatagactggatggaggcggataaagttgcaggaccacttctgcgctcggcccttccggctggctggtttattgctgataaatctggagccggtgagcgtgggtctcgcggtatcattgcagcactggggccagatggtaagccctcccgtatcgtagttatctacacgacggggagtcaggcaactatggatgaacgaaatagacagatcgctgagataggtgcctcactgattaagcattggtaactgtcagaccaagtttactcatatatactttagattgatttaaaacttcatttttaatttaaaaggatctaggtgaagatcctttttgataatctcatgaccaaaatcccttaacgtgagttttcgttccactgagcgtcagaccccgtagaaaagatcaaaggatcttcttgagatcctttttttctgcgcgtaatctgctgcttgcaaacaaaaaaaccaccgctaccagcggtggtttgtttgccggatcaagagctaccaactctttttccgaaggtaactggcttcagcagagcgcagataccaaatactgtccttctagtgtagccgtagttaggccaccacttcaagaactctgtagcaccgcctacatacctcgctctgctaatcctgttaccagtggctgctgccagtggcgataagtcgtgtcttaccgggttggactcaagacgatagttaccggataaggcgcagcggtcgggctgaacggggggttcgtgcacacagcccagcttggagcgaacgacctacaccgaactgagatacctacagcgtgagctatgagaaagcgccacgcttcccgaagggagaaaggcggacaggtatccggtaagcggcagggtcggaacaggagagcgcacgagggagcttccagggggaaacgcctggtatctttatagtcctgtcgggtttcgccacctctgacttgagcgtcgatttttgtgatgctcgtcaggggggcggagcctatggaaaaacgccagcaacgcggcctttttacggttcctggccttttgctggccttttgctcacatgttctttcctgcgttatcccctgattctgtggataaccgtattaccgcctttgagtgagctgataccgctcgccgcagccgaacgaccgagcgcagcgagtcagtgagcgaggaagcggaagagcgcccaatacgcaaaccgcctctccccgcgcgttggccgattcattaatgcagctggcacgacaggtttcccgactggaaagcgggcagtgagcgcaacgcaattaatgtgagttagctcactcattaggcaccccaggctttacactttatgcttccggctcgtatgttgtgtggaattgtgagcggataacaatttcacacaggaaacagcatatgcaaacaagcattactctgacatccaacgcatccggtacgtttgacggttactattacgaactctggaaggatactggcaatacaacaatgacggtctacactcaaggtcgcttttcctgccagtggtcgaacatcaataacgcgttgtttaggaccgggaagaaatacaaccagaattggcagtctcttggcacaatccggatcacgtactctgcgacttacaacccaaacgggaactcctacttgtgtatctatggctggtctaccaacccattggtcgagttctacatcgttgagtcctgggggaactggagaccgcctggtgcctgcttcatcggggatactctcattccgctcgctgacggcaagtcttaccgcatcaaggatctcatggactgggggacggagttcatcgtttacgcgtgcaccccaacgggcaagattgtggctgctcaggctaccgctaagctcacgaggaggaacgctccactcgtgaaggtcatcctggacaatggcgaggagatcatttgcacacccgaccaccagttcatgctgcgggatgggacttacaaggaggcccagctcctgcaggcggagacatcactcatgccattctactccaagactgacaaggatggctacacactgattactcagccttactccagcaggtggcagaaggctcactggatcattgctaggtctggcctcctggggaaggtgccaaggttcgagggccagaagacgttcatccaccatcagaacttcgacgagagcgataaccgccccgagaacctggagttcatgggcaacagggaccactcggcgtaccatcgctctctggtggagaggaatcagcactggcattccgctgagttcgaggagaagagggtcgctagcctcgctcagaaggctaagacctcggagggctaccagtactacgccgagagggggacgcggaacatcttccagtacatggagcagcagccagagcacttcaagaatgcggtcgctggcaacgggaataggggcaagcagtacctcgttgagtacaacaagacagagaagggcagggggaagtcgcaggagatcgcgaaccggtactacacctgcgagatttgcggcgtcgacgttaagacgcccatcgggctgcacaaccatcggcgcaaggagcaccagtgcaatcataaggtggtcgccgtgaacctcctgaattacaccgaggatgtctactgcctcactgttccggagtaccacaacttcgctctcaaggctggggtcttcgttcataatacgtccctgggccaagtgacaatcgatggcgggacctacgacatctataggacgacacgcgtcaaccagccttccattgtggggacagccacgttcgatcagtactggagcgtgcgcacctctaagcggacttcaggaacagtgaccgtgaccgatcacttccgcgcctgggcgaaccggggcctgaacctcggcacaatagaccaaattacattgtgcgtggagggttaccaaagctctggatcagccaacatcacccagaacaccttctctcagggctcttcttccggcagttcgggtggctcatccggctccacaacgactactcgcatcgagtgtgagaacatgtccttgtccggaccctacgttagcaggatcaccaatccctttaatggtattgcgctgtacgccaacggagacacagcccgcgctaccgttaacttccccgcaagtcgcaactacaatttccgcctgcggggttgcggcaacaacaataatcttgcccgtgtggacctgaggatcgacggacggaccgtcgggaccttttattaccagggcacatacccctgggaggccccaattgacaatgtttatgtcagtgcggggagtcatacagtcgaaatcactgttactgcggataacggcacatgggacgtgtatgccgactacctggtgatacagtgactcgagggggggcccggtacccaattcgccctatagtgagtcgtattacaattcactggccgtcgttttacaacgtcgtgactgggaaaaccctggcgttacccaacttaatcgccttgcagcacatccccctttcgccagctggcgtaatagcgaagaggcccgcaccgatcgcccttcccaacagttgcgcagcctgaatggcgaatggaaattgtaagcgttaatattttgttaaaattcgcgttaaatttttgttaaatcagctcattttttaaccaataggccgaaatcggcaaaatcccttataaatcaaaagaatagaccgagatagggttgagtgttgttccagtttggaacaagagtccactattaaagaacgtggactccaacgtcaaagggcgaaaaaccgtctatcagggcgatggcccactacgtgaaccatcaccctaatcaagttttttggggtcgaggtgccgtaaagcactaaatcggaaccctaaagggagcccccgatttagagcttgacggggaaagccggcgaacgtggcgagaaaggaagggaagaaagcgaaaggagcgggcgctagggcgctggcaagtgtagcggtcacgctgcgcgtaaccaccacacccgccgcgcttaatgcgccgctacagggcgcgtcaggtg

SEQ ID NO: 3234 - DNA, 4886 bp, Artificial Sequence
  Synthetic Construct, AT-77 intein modified protein encoding nucleic acids in pBluescript
gcacttttcggggaaatgtgcgcggaacccctatttgtttatttttctaaatacattcaaatatgtatccgctcatgagacaataaccctgataaatgcttcaataatattgaaaaaggaagagtatgagtattcaacatttccgtgtcgcccttattcccttttttgcggcattttgccttcctgtttttgctcacccagaaacgctggtgaaagtaaaagatgctgaagatcagttgggtgcacgagtgggttacatcgaactggatctcaacagcggtaagatccttgagagttttcgccccgaagaacgttttccaatgatgagcacttttaaagttctgctatgtggcgcggtattatcccgtattgacgccgggcaagagcaactcggtcgccgcatacactattctcagaatgacttggttgagtactcaccagtcacagaaaagcatcttacggatggcatgacagtaagagaattatgcagtgctgccataaccatgagtgataacactgcggccaacttacttctgacaacgatcggaggaccgaaggagctaaccgcttttttgcacaacatgggggatcatgtaactcgccttgatcgttgggaaccggagctgaatgaagccataccaaacgacgagcgtgacaccacgatgcctgtagcaatggcaacaacgttgcgcaaactattaactggcgaactacttactctagcttcccggcaacaattaatagactggatggaggcggataaagttgcaggaccacttctgcgctcggcccttccggctggctggtttattgctgataaatctggagccggtgagcgtgggtctcgcggtatcattgcagcactggggccagatggtaagccctcccgtatcgtagttatctacacgacggggagtcaggcaactatggatgaacgaaatagacagatcgctgagataggtgcctcactgattaagcattggtaactgtcagaccaagtttactcatatatactttagattgatttaaaacttcatttttaatttaaaaggatctaggtgaagatcctttttgataatctcatgaccaaaatcccttaacgtgagttttcgttccactgagcgtcagaccccgtagaaaagatcaaaggatcttcttgagatcctttttttctgcgcgtaatctgctgcttgcaaacaaaaaaaccaccgctaccagcggtggtttgtttgccggatcaagagctaccaactctttttccgaaggtaactggcttcagcagagcgcagataccaaatactgtccttctagtgtagccgtagttaggccaccacttcaagaactctgtagcaccgcctacatacctcgctctgctaatcctgttaccagtggctgctgccagtggcgataagtcgtgtcttaccgggttggactcaagacgatagttaccggataaggcgcagcggtcgggctgaacggggggttcgtgcacacagcccagcttggagcgaacgacctacaccgaactgagatacctacagcgtgagctatgagaaagcgccacgcttcccgaagggagaaaggcggacaggtatccggtaagcggcagggtcggaacaggagagcgcacgagggagcttccagggggaaacgcctggtatctttatagtcctgtcgggtttcgccacctctgacttgagcgtcgatttttgtgatgctcgtcaggggggcggagcctatggaaaaacgccagcaacgcggcctttttacggttcctggccttttgctggccttttgctcacatgttctttcctgcgttatcccctgattctgtggataaccgtattaccgcctttgagtgagctgataccgctcgccgcagccgaacgaccgagcgcagcgagtcagtgagcgaggaagcggaagagcgcccaatacgcaaaccgcctctccccgcgcgttggccgattcattaatgcagctggcacgacaggtttcccgactggaaagcgggcagtgagcgcaacgcaattaatgtgagttagctcactcattaggcaccccaggctttacactttatgcttccggctcgtatgttgtgtggaattgtgagcggataacaatttcacacaggaaacagcatatgcaaacaagcattactctgacatccaacgcatccggtacgtttgacggttactattacgaactctggaaggatactggcaatacaacaatgacggtctacactcaaggtcgcttttcctgccagtggtcgaacatcaataacgcgttgtttaggaccgggaagaaatacaaccagaattggcagtctcttggcacaatccggatcacgtactctgcgacttacaacccaaacgggaactcctacttgtgtatctatggctggtctaccaacccattggtcgagttctacatcgttgagtcctgggggaactggagaccgcctggtgccgctctcgctctggataccgctctccctacgccttcggggtggactactatgggggacgttcaggttggggatcagctctacgatgcgcacggcaggccaaccacggtggtcgctgctaccgaggtgctcacggggaggccttgctacgaggtcgagttctcagacggctcccgcatcgttgccgatgcgcagcatcagtggctgaccgagtctagggctgctcggaagtcacgctgggctgctgacaagcagtacaaccgcgccaggaaccagaatatcgtcgcgagcgttgtgacaactgaggctattgctgggaccctcagggtgggcgctgaccagagggccaatcacgctgtcctcacggctgatccactgtccggcagcgacgtcgatctgccaatcccaccctacgttctcggcgcttggctgggcgacgggcactcggcgtctgctaggatcacctgcgagacgccagagattcctatgtacctggaggcttgcgggctgagggtcgaccatcagggcgcgatgctctactccctgaagttcccagacggcgatccgaggggcagcgtccagggcgttctcaggaccatcggcgtgctgaacgacaagcacattccagcggattacctcagggcttccgagggccagaggagggacctcctggctgggctgatggacacagatggcactgtcgttaggggcgttgggtcgtgccagttcgctgtgacaaacaagcggctcgcggacgatgtctacgagctcgtggtctctctggggtacaagtgcggcaggaccacgaggagggtgcagggcaggagcccagagacatcgacttgccatatcctcaatttctcgacggtggacgatgtcttcaggctggagcggaagcacctcctgcataaggaggagaggccagtgacacgggctaggatcgccaggcggtacattactgccgttcgcccaattgagtccgttcctgtgaggtgcgtggaggttgataatacagagcatctctacctcgccggggagagcatgattccaactcataatacgtccctgggccaagtgacaatcgatggcgggacctacgacatctataggacgacacgcgtcaaccagccttccattgtggggacagccacgttcgatcagtactggagcgtgcgcacctctaagcggacttcaggaacagtgaccgtgaccgatcacttccgcgcctgggcgaaccggggcctgaacctcggcacaatagaccaaattacattgtgcgtggagggttaccaaagctctggatcagccaacatcacccagaacaccttctctcagggctcttcttccggcagttcgggtggctcatccggctccacaacgactactcgcatcgagtgtgagaacatgtccttgtccggaccctacgttagcaggatcaccaatccctttaatggtattgcgctgtacgccaacggagacacagcccgcgctaccgttaacttccccgcaagtcgcaactacaatttccgcctgcggggttgcggcaacaacaataatcttgcccgtgtggacctgaggatcgacggacggaccgtcgggaccttttattaccagggcacatacccctgggaggccccaattgacaatgtttatgtcagtgcggggagtcatacagtcgaaatcactgttactgcggataacggcacatgggacgtgtatgccgactacctggtgatacagtgactcgagggggggcccggtacccaattcgccctatagtgagtcgtattacaattcactggccgtcgttttacaacgtcgtgactgggaaaaccctggcgttacccaacttaatcgccttgcagcacatccccctttcgccagctggcgtaatagcgaagaggcccgcaccgatcgcccttcccaacagttgcgcagcctgaatggcgaatggaaattgtaagcgttaatattttgttaaaattcgcgttaaatttttgttaaatcagctcattttttaaccaataggccgaaatcggcaaaatcccttataaatcaaaagaatagaccgagatagggttgagtgttgttccagtttggaacaagagtccactattaaagaacgtggactccaacgtcaaagggcgaaaaaccgtctatcagggcgatggcccactacgtgaaccatcaccctaatcaagttttttggggtcgaggtgccgtaaagcactaaatcggaaccctaaagggagcccccgatttagagcttgacggggaaagccggcgaacgtggcgagaaaggaagggaagaaagcgaaaggagcgggcgctagggcgctggcaagtgtagcggtcacgctgcgcgtaaccaccacacccgccgcgcttaatgcgccgctacagggcgcgtcaggtg

SEQ ID NO: 3235 - DNA, 5051 bp, Artificial Sequence
  Synthetic Construct, AT-78 intein modified protein encoding nucleic acids in pBluescript
gcacttttcggggaaatgtgcgcggaacccctatttgtttatttttctaaatacattcaaatatgtatccgctcatgagacaataaccctgataaatgcttcaataatattgaaaaaggaagagtatgagtattcaacatttccgtgtcgcccttattcccttttttgcggcattttgccttcctgtttttgctcacccagaaacgctggtgaaagtaaaagatgctgaagatcagttgggtgcacgagtgggttacatcgaactggatctcaacagcggtaagatccttgagagttttcgccccgaagaacgttttccaatgatgagcacttttaaagttctgctatgtggcgcggtattatcccgtattgacgccgggcaagagcaactcggtcgccgcatacactattctcagaatgacttggttgagtactcaccagtcacagaaaagcatcttacggatggcatgacagtaagagaattatgcagtgctgccataaccatgagtgataacactgcggccaacttacttctgacaacgatcggaggaccgaaggagctaaccgcttttttgcacaacatgggggatcatgtaactcgccttgatcgttgggaaccggagctgaatgaagccataccaaacgacgagcgtgacaccacgatgcctgtagcaatggcaacaacgttgcgcaaactattaactggcgaactacttactctagcttcccggcaacaattaatagactggatggaggcggataaagttgcaggaccacttctgcgctcggcccttccggctggctggtttattgctgataaatctggagccggtgagcgtgggtctcgcggtatcattgcagcactggggccagatggtaagccctcccgtatcgtagttatctacacgacggggagtcaggcaactatggatgaacgaaatagacagatcgctgagataggtgcctcactgattaagcattggtaactgtcagaccaagtttactcatatatactttagattgatttaaaacttcatttttaatttaaaaggatctaggtgaagatcctttttgataatctcatgaccaaaatcccttaacgtgagttttcgttccactgagcgtcagaccccgtagaaaagatcaaaggatcttcttgagatcctttttttctgcgcgtaatctgctgcttgcaaacaaaaaaaccaccgctaccagcggtggtttgtttgccggatcaagagctaccaactctttttccgaaggtaactggcttcagcagagcgcagataccaaatactgtccttctagtgtagccgtagttaggccaccacttcaagaactctgtagcaccgcctacatacctcgctctgctaatcctgttaccagtggctgctgccagtggcgataagtcgtgtcttaccgggttggactcaagacgatagttaccggataaggcgcagcggtcgggctgaacggggggttcgtgcacacagcccagcttggagcgaacgacctacaccgaactgagatacctacagcgtgagctatgagaaagcgccacgcttcccgaagggagaaaggcggacaggtatccggtaagcggcagggtcggaacaggagagcgcacgagggagcttccagggggaaacgcctggtatctttatagtcctgtcgggtttcgccacctctgacttgagcgtcgatttttgtgatgctcgtcaggggggcggagcctatggaaaaacgccagcaacgcggcctttttacggttcctggccttttgctggccttttgctcacatgttctttcctgcgttatcccctgattctgtggataaccgtattaccgcctttgagtgagctgataccgctcgccgcagccgaacgaccgagcgcagcgagtcagtgagcgaggaagcggaagagcgcccaatacgcaaaccgcctctccccgcgcgttggccgattcattaatgcagctggcacgacaggtttcccgactggaaagcgggcagtgagcgcaacgcaattaatgtgagttagctcactcattaggcaccccaggctttacactttatgcttccggctcgtatgttgtgtggaattgtgagcggataacaatttcacacaggaaacagcatatgcaaacaagcattactctgacatccaacgcatccggtacgtttgacggttactattacgaactctggaaggatactggcaatacaacaatgacggtctacactcaaggtcgcttttcctgccagtggtcgaacatcaataacgcgttgtttaggaccgggaagaaatacaaccagaattggcagtctcttggcacaatccggatcacgtactctgcgacttacaacccaaacgggaactcctacttgtgtatctatggctggtctaccaacccattggtcgagttctacatcgttgagtcctgggggaactggagaccgcctggtgcctgcctccctgaggatgcgctggttcataccgctaaggggctggtccctattcgggatgttcaggtcggggatctcgttcagacaccgctcggcttccgcagggtggtcgacaagttcgatcagggcttccaggacgtgtacgagatcgagactaacgcgacctacccacgcgctacgctcaatcacaggcaggctgtcctggaggacgctaagggcgggatcgtttggaagcatattgcttcgctggaggccggcgataggctcctgcacaacaagcaggtcctcccgggcactgttacccatctgcccgcggacttcactgagagcaggccatcacactcccggaccgccaagtcgttcgttgtgcctgagctcacggctgaggtggcttggctgatcggcttcacacatggcgacggctacgtggctctcggcaggaacaagtacgataagccgtacgggcgggttgagtggtccatgaactccctggacgctgaggtcacctcccgcatccaggctaagattgatgctgctctcgctctgttcggcctctccgctgtccacagcatcacgaagggcgagaacacagctaagagcatctgctccagcattcggctggccgagtacttccaccgccatatcaagcagccaaatattcctctcactgtgccgtcattcatcctgcagggctccgtcgacattagggctgcttacctcgctggcctgatggactccgatggggctgtgaacaataggccaccacacctcatcacatcggtgtaccggtctttcattcgccaggtctcggtcgttctctcgtctctgggcatcgccgggaggctgaccacgacatacccccagaactctaattggcaggtcaagtacaacctcacgatcccggcgctgaaggagcgctacaatgctctcatttctccccattcagccaagggcgagctcaggcaggggctgaagatgtacggcttcacggttccaggggccgtgatgcgggagacgtacacatactctgagatgagggagatgggcttccaggggtcacggacagttgacgccaactacgagcgctacgtggcggaggctgacatctccctcgatattcctgtgactgtcaagggcctggggagctacgatcacgtgcagacctacgacattgaggttgatgaggctcattgcttctactgcgatggctacctcacacataatacgtccctgggccaagtgacaatcgatggcgggacctacgacatctataggacgacacgcgtcaaccagccttccattgtggggacagccacgttcgatcagtactggagcgtgcgcacctctaagcggacttcaggaacagtgaccgtgaccgatcacttccgcgcctgggcgaaccggggcctgaacctcggcacaatagaccaaattacattgtgcgtggagggttaccaaagctctggatcagccaacatcacccagaacaccttctctcagggctcttcttccggcagttcgggtggctcatccggctccacaacgactactcgcatcgagtgtgagaacatgtccttgtccggaccctacgttagcaggatcaccaatccctttaatggtattgcgctgtacgccaacggagacacagcccgcgctaccgttaacttccccgcaagtcgcaactacaatttccgcctgcggggttgcggcaacaacaataatcttgcccgtgtggacctgaggatcgacggacggaccgtcgggaccttttattaccagggcacatacccctgggaggccccaattgacaatgtttatgtcagtgcggggagtcatacagtcgaaatcactgttactgcggataacggcacatgggacgtgtatgccgactacctggtgatacagtgactcgagggggggcccggtacccaattcgccctatagtgagtcgtattacaattcactggccgtcgttttacaacgtcgtgactgggaaaaccctggcgttacccaacttaatcgccttgcagcacatccccctttcgccagctggcgtaatagcgaagaggcccgcaccgatcgcccttcccaacagttgcgcagcctgaatggcgaatggaaattgtaagcgttaatattttgttaaaattcgcgttaaatttttgttaaatcagctcattttttaaccaataggccgaaatcggcaaaatcccttataaatcaaaagaatagaccgagatagggttgagtgttgttccagtttggaacaagagtccactattaaagaacgtggactccaacgtcaaagggcgaaaaaccgtctatcagggcgatggcccactacgtgaaccatcaccctaatcaagttttttggggtcgaggtgccgtaaagcactaaatcggaaccctaaagggagcccccgatttagagcttgacggggaaagccggcgaacgtggcgagaaaggaagggaagaaagcgaaaggagcgggcgctagggcgctggcaagtgtagcggtcacgctgcgcgtaaccaccacacccgccgcgcttaatgcgccgctacagggcgcgtcaggtg

SEQ ID NO: 3236 - DNA, 4322 bp, Artificial Sequence
  Synthetic Construct, AT-79 intein modified protein encoding nucleic acids in pBluescript
gcacttttcggggaaatgtgcgcggaacccctatttgtttatttttctaaatacattcaaatatgtatccgctcatgagacaataaccctgataaatgcttcaataatattgaaaaaggaagagtatgagtattcaacatttccgtgtcgcccttattcccttttttgcggcattttgccttcctgtttttgctcacccagaaacgctggtgaaagtaaaagatgctgaagatcagttgggtgcacgagtgggttacatcgaactggatctcaacagcggtaagatccttgagagttttcgccccgaagaacgttttccaatgatgagcacttttaaagttctgctatgtggcgcggtattatcccgtattgacgccgggcaagagcaactcggtcgccgcatacactattctcagaatgacttggttgagtactcaccagtcacagaaaagcatcttacggatggcatgacagtaagagaattatgcagtgctgccataaccatgagtgataacactgcggccaacttacttctgacaacgatcggaggaccgaaggagctaaccgcttttttgcacaacatgggggatcatgtaactcgccttgatcgttgggaaccggagctgaatgaagccataccaaacgacgagcgtgacaccacgatgcctgtagcaatggcaacaacgttgcgcaaactattaactggcgaactacttactctagcttcccggcaacaattaatagactggatggaggcggataaagttgcaggaccacttctgcgctcggcccttccggctggctggtttattgctgataaatctggagccggtgagcgtgggtctcgcggtatcattgcagcactggggccagatggtaagccctcccgtatcgtagttatctacacgacggggagtcaggcaactatggatgaacgaaatagacagatcgctgagataggtgcctcactgattaagcattggtaactgtcagaccaagtttactcatatatactttagattgatttaaaacttcatttttaatttaaaaggatctaggtgaagatcctttttgataatctcatgaccaaaatcccttaacgtgagttttcgttccactgagcgtcagaccccgtagaaaagatcaaaggatcttcttgagatcctttttttctgcgcgtaatctgctgcttgcaaacaaaaaaaccaccgctaccagcggtggtttgtttgccggatcaagagctaccaactctttttccgaaggtaactggcttcagcagagcgcagataccaaatactgtccttctagtgtagccgtagttaggccaccacttcaagaactctgtagcaccgcctacatacctcgctctgctaatcctgttaccagtggctgctgccagtggcgataagtcgtgtcttaccgggttggactcaagacgatagttaccggataaggcgcagcggtcgggctgaacggggggttcgtgcacacagcccagcttggagcgaacgacctacaccgaactgagatacctacagcgtgagctatgagaaagcgccacgcttcccgaagggagaaaggcggacaggtatccggtaagcggcagggtcggaacaggagagcgcacgagggagcttccagggggaaacgcctggtatctttatagtcctgtcgggtttcgccacctctgacttgagcgtcgatttttgtgatgctcgtcaggggggcggagcctatggaaaaacgccagcaacgcggcctttttacggttcctggccttttgctggccttttgctcacatgttctttcctgcgttatcccctgattctgtggataaccgtattaccgcctttgagtgagctgataccgctcgccgcagccgaacgaccgagcgcagcgagtcagtgagcgaggaagcggaagagcgcccaatacgcaaaccgcctctccccgcgcgttggccgattcattaatgcagctggcacgacaggtttcccgactggaaagcgggcagtgagcgcaacgcaattaatgtgagttagctcactcattaggcaccccaggctttacactttatgcttccggctcgtatgttgtgtggaattgtgagcggataacaatttcacacaggaaacagcatatgcaaacaagcattactctgacatccaacgcatccggtacgtttgacggttactattacgaactctggaaggatactggcaatacaacaatgacggtctacactcaaggtcgcttttcctgccagtggtcgaacatcaataacgcgttgtttaggaccgggaagaaatacaaccagaattggcagtctcttggcacaatccggatcacgtactctgcgacttacaacccaaacgggaactcctacttgtgtatctatggctggtctaccaacccattggtcgagttctacatcgttgagtcctgggggaactggagaccgcctggtgcctgcgtggattacgagactgaggtcgtgctggggaatggggagcggaagaagatcggggagatcgtggagcgggctattgaggaggctgagaagaacggcaagctcgggcgggttgacgatggcttctacgctccgatcgacattgaggtctactcgctcgatctggagaccctcaaggttcggaaggcgcgggcaaatatcgcgtggaagcgcacagctccaaagaagatgatgctggtgaagactaggggcgggaagcgcattagggtcaccccgacgcaccccttcttcgttctggaggagggcaaggtggctatgaggaaggcccgggacctggaggagggcaacaagatcgccacgattgaggggctctccgtgagctgggacgaggtcgcggagatcctggagtacgagccaaaggatccttgggtctacgatctgcaggttccaggctaccacaacttcctcgctaatggcatcttcgttcataatacgtccctgggccaagtgacaatcgatggcgggacctacgacatctataggacgacacgcgtcaaccagccttccattgtggggacagccacgttcgatcagtactggagcgtgcgcacctctaagcggacttcaggaacagtgaccgtgaccgatcacttccgcgcctgggcgaaccggggcctgaacctcggcacaatagaccaaattacattgtgcgtggagggttaccaaagctctggatcagccaacatcacccagaacaccttctctcagggctcttcttccggcagttcgggtggctcatccggctccacaacgactactcgcatcgagtgtgagaacatgtccttgtccggaccctacgttagcaggatcaccaatccctttaatggtattgcgctgtacgccaacggagacacagcccgcgctaccgttaacttccccgcaagtcgcaactacaatttccgcctgcggggttgcggcaacaacaataatcttgcccgtgtggacctgaggatcgacggacggaccgtcgggaccttttattaccagggcacatacccctgggaggccccaattgacaatgtttatgtcagtgcggggagtcatacagtcgaaatcactgttactgcggataacggcacatgggacgtgtatgccgactacctggtgatacagtgactcgagggggggcccggtacccaattcgccctatagtgagtcgtattacaattcactggccgtcgttttacaacgtcgtgactgggaaaaccctggcgttacccaacttaatcgccttgcagcacatccccctttcgccagctggcgtaatagcgaagaggcccgcaccgatcgcccttcccaacagttgcgcagcctgaatggcgaatggaaattgtaagcgttaatattttgttaaaattcgcgttaaatttttgttaaatcagctcattttttaaccaataggccgaaatcggcaaaatcccttataaatcaaaagaatagaccgagatagggttgagtgttgttccagtttggaacaagagtccactattaaagaacgtggactccaacgtcaaagggcgaaaaaccgtctatcagggcgatggcccactacgtgaaccatcaccctaatcaagttttttggggtcgaggtgccgtaaagcactaaatcggaaccctaaagggagcccccgatttagagcttgacggggaaagccggcgaacgtggcgagaaaggaagggaagaaagcgaaaggagcgggcgctagggcgctggcaagtgtagcggtcacgctgcgcgtaaccaccacacccgccgcgcttaatgcgccgctacagggcgcgtcaggtg

SEQ ID NO: 3237 - DNA, 4634 bp, Artificial Sequence
  Synthetic Construct, AT-80 intein modified protein encoding nucleic acids in pBluescript
gcacttttcggggaaatgtgcgcggaacccctatttgtttatttttctaaatacattcaaatatgtatccgctcatgagacaataaccctgataaatgcttcaataatattgaaaaaggaagagtatgagtattcaacatttccgtgtcgcccttattcccttttttgcggcattttgccttcctgtttttgctcacccagaaacgctggtgaaagtaaaagatgctgaagatcagttgggtgcacgagtgggttacatcgaactggatctcaacagcggtaagatccttgagagttttcgccccgaagaacgttttccaatgatgagcacttttaaagttctgctatgtggcgcggtattatcccgtattgacgccgggcaagagcaactcggtcgccgcatacactattctcagaatgacttggttgagtactcaccagtcacagaaaagcatcttacggatggcatgacagtaagagaattatgcagtgctgccataaccatgagtgataacactgcggccaacttacttctgacaacgatcggaggaccgaaggagctaaccgcttttttgcacaacatgggggatcatgtaactcgccttgatcgttgggaaccggagctgaatgaagccataccaaacgacgagcgtgacaccacgatgcctgtagcaatggcaacaacgttgcgcaaactattaactggcgaactacttactctagcttcccggcaacaattaatagactggatggaggcggataaagttgcaggaccacttctgcgctcggcccttccggctggctggtttattgctgataaatctggagccggtgagcgtgggtctcgcggtatcattgcagcactggggccagatggtaagccctcccgtatcgtagttatctacacgacggggagtcaggcaactatggatgaacgaaatagacagatcgctgagataggtgcctcactgattaagcattggtaactgtcagaccaagtttactcatatatactttagattgatttaaaacttcatttttaatttaaaaggatctaggtgaagatcctttttgataatctcatgaccaaaatcccttaacgtgagttttcgttccactgagcgtcagaccccgtagaaaagatcaaaggatcttcttgagatcctttttttctgcgcgtaatctgctgcttgcaaacaaaaaaaccaccgctaccagcggtggtttgtttgccggatcaagagctaccaactctttttccgaaggtaactggcttcagcagagcgcagataccaaatactgtccttctagtgtagccgtagttaggccaccacttcaagaactctgtagcaccgcctacatacctcgctctgctaatcctgttaccagtggctgctgccagtggcgataagtcgtgtcttaccgggttggactcaagacgatagttaccggataaggcgcagcggtcgggctgaacggggggttcgtgcacacagcccagcttggagcgaacgacctacaccgaactgagatacctacagcgtgagctatgagaaagcgccacgcttcccgaagggagaaaggcggacaggtatccggtaagcggcagggtcggaacaggagagcgcacgagggagcttccagggggaaacgcctggtatctttatagtcctgtcgggtttcgccacctctgacttgagcgtcgatttttgtgatgctcgtcaggggggcggagcctatggaaaaacgccagcaacgcggcctttttacggttcctggccttttgctggccttttgctcacatgttctttcctgcgttatcccctgattctgtggataaccgtattaccgcctttgagtgagctgataccgctcgccgcagccgaacgaccgagcgcagcgagtcagtgagcgaggaagcggaagagcgcccaatacgcaaaccgcctctccccgcgcgttggccgattcattaatgcagctggcacgacaggtttcccgactggaaagcgggcagtgagcgcaacgcaattaatgtgagttagctcactcattaggcaccccaggctttacactttatgcttccggctcgtatgttgtgtggaattgtgagcggataacaatttcacacaggaaacagcatatgcaaacaagcattactctgacatccaacgcatccggtacgtttgacggttactattacgaactctggaaggatactggcaatacaacaatgacggtctacactcaaggtcgcttttcctgccagtggtcgaacatcaataacgcgttgtttaggaccgggaagaaatacaaccagaattggcagtctcttggcacaatccggatcacgtactctgcgacttacaacccaaacgggaactcctacttgtgtatctatggctggtctaccaacccattggtcgagttctacatcgttgagtcctgggggaactggagaccgcctggtgcctgcgtcgcgcctgagacactgattattactgagaatgggacaaaggagatcggggaggtcgtggagcggtggatgaaggagctgggcgagatcgagtacgacgatggcatttcgtactctccggccttcgagaaggttgcgtccctgaacggcgggaaggtgaagatgctcccggtccgcagggtttggaagctgaggagcccaggcaagatgatcaagattcgctcagagtccgggaagcagatcaccgtcacgccagagacaaagctcctgactatcattgacggctcgctggagtgggtggaggctcgcaagctgaagaaggggaactacgttgcggtggtcaataaggagaggagcatcgtgcctattggcgacttcctcgctaagctcctgaagttctacggggtcgagctgaacctcaatgaggctgttgagcgcgaccaggccaggaagctcctggagaccctgaagtctaagggcctctcagatgtcacgatcgagattccagagaagctccggcgcttcatcaagtgcgaccgcgtgcgctacgtggatctggttgagatgctctccagcatggagggcgagctgaaggaggaggtcatgctcctgctctccgacgtgggggatatccacgaggtcattcaggagcggctgaaggagatcggcaagattctggagagcgacgcgtcgtgggagaggatcgctgaggtggaggaggttgtgcgggatggccatgtctacgatctcacagtggagggctctcattctttcattgctaatggcttcgtggttcataacacgtccctgggccaagtgacaatcgatggcgggacctacgacatctataggacgacacgcgtcaaccagccttccattgtggggacagccacgttcgatcagtactggagcgtgcgcacctctaagcggacttcaggaacagtgaccgtgaccgatcacttccgcgcctgggcgaaccggggcctgaacctcggcacaatagaccaaattacattgtgcgtggagggttaccaaagctctggatcagccaacatcacccagaacaccttctctcagggctcttcttccggcagttcgggtggctcatccggctccacaacgactactcgcatcgagtgtgagaacatgtccttgtccggaccctacgttagcaggatcaccaatccctttaatggtattgcgctgtacgccaacggagacacagcccgcgctaccgttaacttccccgcaagtcgcaactacaatttccgcctgcggggttgcggcaacaacaataatcttgcccgtgtggacctgaggatcgacggacggaccgtcgggaccttttattaccagggcacatacccctgggaggccccaattgacaatgtttatgtcagtgcggggagtcatacagtcgaaatcactgttactgcggataacggcacatgggacgtgtatgccgactacctggtgatacagtgactcgagggggggcccggtacccaattcgccctatagtgagtcgtattacaattcactggccgtcgttttacaacgtcgtgactgggaaaaccctggcgttacccaacttaatcgccttgcagcacatccccctttcgccagctggcgtaatagcgaagaggcccgcaccgatcgcccttcccaacagttgcgcagcctgaatggcgaatggaaattgtaagcgttaatattttgttaaaattcgcgttaaatttttgttaaatcagctcattttttaaccaataggccgaaatcggcaaaatcccttataaatcaaaagaatagaccgagatagggttgagtgttgttccagtttggaacaagagtccactattaaagaacgtggactccaacgtcaaagggcgaaaaaccgtctatcagggcgatggcccactacgtgaaccatcaccctaatcaagttttttggggtcgaggtgccgtaaagcactaaatcggaaccctaaagggagcccccgatttagagcttgacggggaaagccggcgaacgtggcgagaaaggaagggaagaaagcgaaaggagcgggcgctagggcgctggcaagtgtagcggtcacgctgcgcgtaaccaccacacccgccgcgcttaatgcgccgctacagggcgcgtcaggtg

SEQ ID NO: 3238 - DNA, 5012 bp, Artificial Sequence
  Synthetic Construct, AT-81 intein modified protein encoding nucleic acids in pBluescript
gcacttttcggggaaatgtgcgcggaacccctatttgtttatttttctaaatacattcaaatatgtatccgctcatgagacaataaccctgataaatgcttcaataatattgaaaaaggaagagtatgagtattcaacatttccgtgtcgcccttattcccttttttgcggcattttgccttcctgtttttgctcacccagaaacgctggtgaaagtaaaagatgctgaagatcagttgggtgcacgagtgggttacatcgaactggatctcaacagcggtaagatccttgagagttttcgccccgaagaacgttttccaatgatgagcacttttaaagttctgctatgtggcgcggtattatcccgtattgacgccgggcaagagcaactcggtcgccgcatacactattctcagaatgacttggttgagtactcaccagtcacagaaaagcatcttacggatggcatgacagtaagagaattatgcagtgctgccataaccatgagtgataacactgcggccaacttacttctgacaacgatcggaggaccgaaggagctaaccgcttttttgcacaacatgggggatcatgtaactcgccttgatcgttgggaaccggagctgaatgaagccataccaaacgacgagcgtgacaccacgatgcctgtagcaatggcaacaacgttgcgcaaactattaactggcgaactacttactctagcttcccggcaacaattaatagactggatggaggcggataaagttgcaggaccacttctgcgctcggcccttccggctggctggtttattgctgataaatctggagccggtgagcgtgggtctcgcggtatcattgcagcactggggccagatggtaagccctcccgtatcgtagttatctacacgacggggagtcaggcaactatggatgaacgaaatagacagatcgctgagataggtgcctcactgattaagcattggtaactgtcagaccaagtttactcatatatactttagattgatttaaaacttcatttttaatttaaaaggatctaggtgaagatcctttttgataatctcatgaccaaaatcccttaacgtgagttttcgttccactgagcgtcagaccccgtagaaaagatcaaaggatcttcttgagatcctttttttctgcgcgtaatctgctgcttgcaaacaaaaaaaccaccgctaccagcggtggtttgtttgccggatcaagagctaccaactctttttccgaaggtaactggcttcagcagagcgcagataccaaatactgtccttctagtgtagccgtagttaggccaccacttcaagaactctgtagcaccgcctacatacctcgctctgctaatcctgttaccagtggctgctgccagtggcgataagtcgtgtcttaccgggttggactcaagacgatagttaccggataaggcgcagcggtcgggctgaacggggggttcgtgcacacagcccagcttggagcgaacgacctacaccgaactgagatacctacagcgtgagctatgagaaagcgccacgcttcccgaagggagaaaggcggacaggtatccggtaagcggcagggtcggaacaggagagcgcacgagggagcttccagggggaaacgcctggtatctttatagtcctgtcgggtttcgccacctctgacttgagcgtcgatttttgtgatgctcgtcaggggggcggagcctatggaaaaacgccagcaacgcggcctttttacggttcctggccttttgctggccttttgctcacatgttctttcctgcgttatcccctgattctgtggataaccgtattaccgcctttgagtgagctgataccgctcgccgcagccgaacgaccgagcgcagcgagtcagtgagcgaggaagcggaagagcgcccaatacgcaaaccgcctctccccgcgcgttggccgattcattaatgcagctggcacgacaggtttcccgactggaaagcgggcagtgagcgcaacgcaattaatgtgagttagctcactcattaggcaccccaggctttacactttatgcttccggctcgtatgttgtgtggaattgtgagcggataacaatttcacacaggaaacagcatatgcaaacaagcattactctgacatccaacgcatccggtacgtttgacggttactattacgaactctggaaggatactggcaatacaacaatgacggtctacactcaaggtcgcttttcctgccagtggtcgaacatcaataacgcgttgtttaggaccgggaagaaatacaaccagaattggcagtctcttggcacaatccggatcacgtactctgcgacttacaacccaaacgggaactcctacttgtgtatctatggctggtctaccaacccattggtcgagttctacatcgttgagtcctgggggaactggagaccgcctggtgcctgcctcctccctgatgagaaggtcgtggttccctcggtcgggttcgtgacactcaaggagctgttcgagacggcttccaaggtcgtggagcgcgacgatgagaaggagatcagggagctcgacgagcggattaccagcgttaacggcgatgggaagacgggcctggtcaaggcctcctacgtgtggaaggttaggcacaagggcaaggtcatccgggtcaagctcaagaattggcacggcgttacagtgactccggagcatcccttcctcaccacgaaggggtggaagagggctgaccagctgaggccaggcgattacgtcgcggttcctaggttcatccatggcaacgaggacgagaagattttcctctcctacgtgaaggtcaagaagtctggcgaggagtggaaggagtacttctacctggcgggcaggaaggggaacatcgatgtcaatctcctgttcgttgctccaaagcgctacgtggtcgagttcctccgggggtacttcgaggagcgctccgaggtcaagggcgagagcgttatcgtggaggctcgggagctggtggagcctctcagcctggctctcctgaggttcggcatcttctctaagattcaggggtcaaagctcatcgtcaccggcaagcgcaacctggaggccttcaaggactacattggcttcaaggatgagagggagaaggccctggaggaggcgatcgagaaggtgaagggctccgaggtctacccgatcttcgaggagattcgcaggctccgcctcctgttcgggttcacaagggaggagctgggctcatacgctaagtacgagaactccgaggccccgacttacgaggagctcatggagatcctggacttcattgagagggggtcccccagcctctcgaagaagatcgcgattctggagggcaagctgaaggctgagctcagggtgctggaggaggagggcctgatcaaggacgggaagctcaccccactgggcagggagctcctggaggtctggcggaaccgcgagttcgattccaaggacgtcgattacatccggaacattgcggagacgctggtgttcatccccgttgagaatgtggaggaggaggagtacgacggctacgtttacgatctcactacggagactcataacttcattgctaatggcatcctcgttcataatacgtccctgggccaagtgacaatcgatggcgggacctacgacatctataggacgacacgcgtcaaccagccttccattgtggggacagccacgttcgatcagtactggagcgtgcgcacctctaagcggacttcaggaacagtgaccgtgaccgatcacttccgcgcctgggcgaaccggggcctgaacctcggcacaatagaccaaattacattgtgcgtggagggttaccaaagctctggatcagccaacatcacccagaacaccttctctcagggctcttcttccggcagttcgggtggctcatccggctccacaacgactactcgcatcgagtgtgagaacatgtccttgtccggaccctacgttagcaggatcaccaatccctttaatggtattgcgctgtacgccaacggagacacagcccgcgctaccgttaacttccccgcaagtcgcaactacaatttccgcctgcggggttgcggcaacaacaataatcttgcccgtgtggacctgaggatcgacggacggaccgtcgggaccttttattaccagggcacatacccctgggaggccccaattgacaatgtttatgtcagtgcggggagtcatacagtcgaaatcactgttactgcggataacggcacatgggacgtgtatgccgactacctggtgatacagtgactcgagggggggcccggtacccaattcgccctatagtgagtcgtattacaattcactggccgtcgttttacaacgtcgtgactgggaaaaccctggcgttacccaacttaatcgccttgcagcacatccccctttcgccagctggcgtaatagcgaagaggcccgcaccgatcgcccttcccaacagttgcgcagcctgaatggcgaatggaaattgtaagcgttaatattttgttaaaattcgcgttaaatttttgttaaatcagctcattttttaaccaataggccgaaatcggcaaaatcccttataaatcaaaagaatagaccgagatagggttgagtgttgttccagtttggaacaagagtccactattaaagaacgtggactccaacgtcaaagggcgaaaaaccgtctatcagggcgatggcccactacgtgaaccatcaccctaatcaagttttttggggtcgaggtgccgtaaagcactaaatcggaaccctaaagggagcccccgatttagagcttgacggggaaagccggcgaacgtggcgagaaaggaagggaagaaagcgaaaggagcgggcgctagggcgctggcaagtgtagcggtcacgctgcgcgtaaccaccacacccgccgcgcttaatgcgccgctacagggcgcgtcaggtg

SEQ ID NO: 3239 - DNA, 4418 bp, Artificial Sequence
  Synthetic Construct, AT-82 intein modified protein encoding nucleic acids in pBluescript
gcacttttcggggaaatgtgcgcggaacccctatttgtttatttttctaaatacattcaaatatgtatccgctcatgagacaataaccctgataaatgcttcaataatattgaaaaaggaagagtatgagtattcaacatttccgtgtcgcccttattcccttttttgcggcattttgccttcctgtttttgctcacccagaaacgctggtgaaagtaaaagatgctgaagatcagttgggtgcacgagtgggttacatcgaactggatctcaacagcggtaagatccttgagagttttcgccccgaagaacgttttccaatgatgagcacttttaaagttctgctatgtggcgcggtattatcccgtattgacgccgggcaagagcaactcggtcgccgcatacactattctcagaatgacttggttgagtactcaccagtcacagaaaagcatcttacggatggcatgacagtaagagaattatgcagtgctgccataaccatgagtgataacactgcggccaacttacttctgacaacgatcggaggaccgaaggagctaaccgcttttttgcacaacatgggggatcatgtaactcgccttgatcgttgggaaccggagctgaatgaagccataccaaacgacgagcgtgacaccacgatgcctgtagcaatggcaacaacgttgcgcaaactattaactggcgaactacttactctagcttcccggcaacaattaatagactggatggaggcggataaagttgcaggaccacttctgcgctcggcccttccggctggctggtttattgctgataaatctggagccggtgagcgtgggtctcgcggtatcattgcagcactggggccagatggtaagccctcccgtatcgtagttatctacacgacggggagtcaggcaactatggatgaacgaaatagacagatcgctgagataggtgcctcactgattaagcattggtaactgtcagaccaagtttactcatatatactttagattgatttaaaacttcatttttaatttaaaaggatctaggtgaagatcctttttgataatctcatgaccaaaatcccttaacgtgagttttcgttccactgagcgtcagaccccgtagaaaagatcaaaggatcttcttgagatcctttttttctgcgcgtaatctgctgcttgcaaacaaaaaaaccaccgctaccagcggtggtttgtttgccggatcaagagctaccaactctttttccgaaggtaactggcttcagcagagcgcagataccaaatactgtccttctagtgtagccgtagttaggccaccacttcaagaactctgtagcaccgcctacatacctcgctctgctaatcctgttaccagtggctgctgccagtggcgataagtcgtgtcttaccgggttggactcaagacgatagttaccggataaggcgcagcggtcgggctgaacggggggttcgtgcacacagcccagcttggagcgaacgacctacaccgaactgagatacctacagcgtgagctatgagaaagcgccacgcttcccgaagggagaaaggcggacaggtatccggtaagcggcagggtcggaacaggagagcgcacgagggagcttccagggggaaacgcctggtatctttatagtcctgtcgggtttcgccacctctgacttgagcgtcgatttttgtgatgctcgtcaggggggcggagcctatggaaaaacgccagcaacgcggcctttttacggttcctggccttttgctggccttttgctcacatgttctttcctgcgttatcccctgattctgtggataaccgtattaccgcctttgagtgagctgataccgctcgccgcagccgaacgaccgagcgcagcgagtcagtgagcgaggaagcggaagagcgcccaatacgcaaaccgcctctccccgcgcgttggccgattcattaatgcagctggcacgacaggtttcccgactggaaagcgggcagtgagcgcaacgcaattaatgtgagttagctcactcattaggcaccccaggctttacactttatgcttccggctcgtatgttgtgtggaattgtgagcggataacaatttcacacaggaaacagcatatgcaaacaagcattactctgacatccaacgcatccggtacgtttgacggttactattacgaactctggaaggatactggcaatacaacaatgacggtctacactcaaggtcgcttttcctgccagtggtcgaacatcaataacgcgttgtttaggaccgggaagaaatacaaccagaattggcagtctcttggcacaatccggatcacgtactctgcgacttacaacccaaacgggaactcctacttgtgtatctatggctggtctaccaacccattggtcgagttctacatcgttgagtcctgggggaactggagaccgcctggtgccgcgctctactacttctctgagattcagctccctaacggcaaggagttcatcggcaagctcgtggatgagctgttcgagaagtaccatgacaagatcggcaagtacaaggatatggagtatgtggagctcaacgaggaggacacattcgaggtcatctcaattgggccagatctgtccgctaggaggcacaaagtgactcatgtctggcggcgcaaggttaaggacggcgagaagctcgtgaagatcaggaccgctagcgggaaggagctcgtgctgacgcaggaccacccggttttcgtgctcctgggcagggacgtcgctaggagggatgctggcaacgtcaaggttggggacgagattgcggtgctcaatacgcggcccgatttctcggtcctgtctccgcccgctatgccagagctcctgtctgagcctttcaattacgagctgtccagcatcggcgacgtcgcttgggatgaggtggtcgaggttgacgagattgatgccaagggcctcggggtggagtacctgtacgatctcacagtggatatcaatcataactacgttgctaatggcattgtcgtttctaatacgtccctgggccaagtgacaatcgatggcgggacctacgacatctataggacgacacgcgtcaaccagccttccattgtggggacagccacgttcgatcagtactggagcgtgcgcacctctaagcggacttcaggaacagtgaccgtgaccgatcacttccgcgcctgggcgaaccggggcctgaacctcggcacaatagaccaaattacattgtgcgtggagggttaccaaagctctggatcagccaacatcacccagaacaccttctctcagggctcttcttccggcagttcgggtggctcatccggctccacaacgactactcgcatcgagtgtgagaacatgtccttgtccggaccctacgttagcaggatcaccaatccctttaatggtattgcgctgtacgccaacggagacacagcccgcgctaccgttaacttccccgcaagtcgcaactacaatttccgcctgcggggttgcggcaacaacaataatcttgcccgtgtggacctgaggatcgacggacggaccgtcgggaccttttattaccagggcacatacccctgggaggccccaattgacaatgtttatgtcagtgcggggagtcatacagtcgaaatcactgttactgcggataacggcacatgggacgtgtatgccgactacctggtgatacagtgactcgagggggggcccggtacccaattcgccctatagtgagtcgtattacaattcactggccgtcgttttacaacgtcgtgactgggaaaaccctggcgttacccaacttaatcgccttgcagcacatccccctttcgccagctggcgtaatagcgaagaggcccgcaccgatcgcccttcccaacagttgcgcagcctgaatggcgaatggaaattgtaagcgttaatattttgttaaaattcgcgttaaatttttgttaaatcagctcattttttaaccaataggccgaaatcggcaaaatcccttataaatcaaaagaatagaccgagatagggttgagtgttgttccagtttggaacaagagtccactattaaagaacgtggactccaacgtcaaagggcgaaaaaccgtctatcagggcgatggcccactacgtgaaccatcaccctaatcaagttttttggggtcgaggtgccgtaaagcactaaatcggaaccctaaagggagcccccgatttagagcttgacggggaaagccggcgaacgtggcgagaaaggaagggaagaaagcgaaaggagcgggcgctagggcgctggcaagtgtagcggtcacgctgcgcgtaaccaccacacccgccgcgcttaatgcgccgctacagggcgcgtcaggtg

SEQ ID NO: 3240 - DNA, 4829 bp, Artificial Sequence
  Synthetic Construct, AT-83 intein modified protein encoding nucleic acids in pBluescript
gcacttttcggggaaatgtgcgcggaacccctatttgtttatttttctaaatacattcaaatatgtatccgctcatgagacaataaccctgataaatgcttcaataatattgaaaaaggaagagtatgagtattcaacatttccgtgtcgcccttattcccttttttgcggcattttgccttcctgtttttgctcacccagaaacgctggtgaaagtaaaagatgctgaagatcagttgggtgcacgagtgggttacatcgaactggatctcaacagcggtaagatccttgagagttttcgccccgaagaacgttttccaatgatgagcacttttaaagttctgctatgtggcgcggtattatcccgtattgacgccgggcaagagcaactcggtcgccgcatacactattctcagaatgacttggttgagtactcaccagtcacagaaaagcatcttacggatggcatgacagtaagagaattatgcagtgctgccataaccatgagtgataacactgcggccaacttacttctgacaacgatcggaggaccgaaggagctaaccgcttttttgcacaacatgggggatcatgtaactcgccttgatcgttgggaaccggagctgaatgaagccataccaaacgacgagcgtgacaccacgatgcctgtagcaatggcaacaacgttgcgcaaactattaactggcgaactacttactctagcttcccggcaacaattaatagactggatggaggcggataaagttgcaggaccacttctgcgctcggcccttccggctggctggtttattgctgataaatctggagccggtgagcgtgggtctcgcggtatcattgcagcactggggccagatggtaagccctcccgtatcgtagttatctacacgacggggagtcaggcaactatggatgaacgaaatagacagatcgctgagataggtgcctcactgattaagcattggtaactgtcagaccaagtttactcatatatactttagattgatttaaaacttcatttttaatttaaaaggatctaggtgaagatcctttttgataatctcatgaccaaaatcccttaacgtgagttttcgttccactgagcgtcagaccccgtagaaaagatcaaaggatcttcttgagatcctttttttctgcgcgtaatctgctgcttgcaaacaaaaaaaccaccgctaccagcggtggtttgtttgccggatcaagagctaccaactctttttccgaaggtaactggcttcagcagagcgcagataccaaatactgtccttctagtgtagccgtagttaggccaccacttcaagaactctgtagcaccgcctacatacctcgctctgctaatcctgttaccagtggctgctgccagtggcgataagtcgtgtcttaccgggttggactcaagacgatagttaccggataaggcgcagcggtcgggctgaacggggggttcgtgcacacagcccagcttggagcgaacgacctacaccgaactgagatacctacagcgtgagctatgagaaagcgccacgcttcccgaagggagaaaggcggacaggtatccggtaagcggcagggtcggaacaggagagcgcacgagggagcttccagggggaaacgcctggtatctttatagtcctgtcgggtttcgccacctctgacttgagcgtcgatttttgtgatgctcgtcaggggggcggagcctatggaaaaacgccagcaacgcggcctttttacggttcctggccttttgctggccttttgctcacatgttctttcctgcgttatcccctgattctgtggataaccgtattaccgcctttgagtgagctgataccgctcgccgcagccgaacgaccgagcgcagcgagtcagtgagcgaggaagcggaagagcgcccaatacgcaaaccgcctctccccgcgcgttggccgattcattaatgcagctggcacgacaggtttcccgactggaaagcgggcagtgagcgcaacgcaattaatgtgagttagctcactcattaggcaccccaggctttacactttatgcttccggctcgtatgttgtgtggaattgtgagcggataacaatttcacacaggaaacagcatatgcaaacaagcattactctgacatccaacgcatccggtacgtttgacggttactattacgaactctggaaggatactggcaatacaacaatgacggtctacactcaaggtcgcttttcctgccagtggtcgaacatcaataacgcgttgtttaggaccgggaagaaatacaaccagaattggcagtctcttggcacaatccggatcacgtactctgcgacttacaacccaaacgggaactcctacttgtgtatctatggctggtctaccaacccattggtcgagttctacatcgttgagtcctgggggaactggagaccgcctggtgcctgcttcagcggggaggagacagtcgttattcgggagaatggggaggtcaaggtgctcaggctcaaggatttcgtggagaaggctctggagaagccaagcggcgaggggctggacggcgatgtgaaggtggtctaccacgacttccgcaacgagaatgtcgaggttctcaccaaggatggcttcacgaagctcctgtacgctaacaagaggatcgggaagcagaagctccgcagggttgtgaatctggagaaggactactggttcgctctcacccccgaccataaggtctacaccacggatggcctgaaggaggccggggagatcacagagaaggacgagctcatctctgtcccaattactgttttcgattgcgaggacgaggatctgaagaagatcggcctcctgcctctcacctcggacgatgagcggctgcgcaagatcgccacgctcatgggcattctgttcaacggcgggtctatcgacgagggcctcggggtgctcacactgaagtccgagaggagcgttatcgagaagttcgtgattaccctcaaggagctgttcggcaagttcgagtacgagatcattaaggaggagaacacaatcctgaagactagggacccgcggatcattaagttcctcgtcggcctgggggctccaattgagggcaaggatctcaagatgccatggtgggttaagctgaagccttcactcttcctggccttcctggagggcttccgggctcacatcgtggagcagctggtcgacgatccgaacaagaatctccccttcttccaggagctgtcctggtacctcggcctgttcgggatcaaggcggacattaaggttgaggaagtgggcgacaagcataagatcattttcgatgctgggcgcctcgacgtcgataagcagttcatcgagacgtgggaggacgtggaggtcacctacaacctcactacggagaagggcaatctgctcgccaatgggctcttcgttaagaacacgtccctgggccaagtgacaatcgatggcgggacctacgacatctataggacgacacgcgtcaaccagccttccattgtggggacagccacgttcgatcagtactggagcgtgcgcacctctaagcggacttcaggaacagtgaccgtgaccgatcacttccgcgcctgggcgaaccggggcctgaacctcggcacaatagaccaaattacattgtgcgtggagggttaccaaagctctggatcagccaacatcacccagaacaccttctctcagggctcttcttccggcagttcgggtggctcatccggctccacaacgactactcgcatcgagtgtgagaacatgtccttgtccggaccctacgttagcaggatcaccaatccctttaatggtattgcgctgtacgccaacggagacacagcccgcgctaccgttaacttccccgcaagtcgcaactacaatttccgcctgcggggttgcggcaacaacaataatcttgcccgtgtggacctgaggatcgacggacggaccgtcgggaccttttattaccagggcacatacccctgggaggccccaattgacaatgtttatgtcagtgcggggagtcatacagtcgaaatcactgttactgcggataacggcacatgggacgtgtatgccgactacctggtgatacagtgactcgagggggggcccggtacccaattcgccctatagtgagtcgtattacaattcactggccgtcgttttacaacgtcgtgactgggaaaaccctggcgttacccaacttaatcgccttgcagcacatccccctttcgccagctggcgtaatagcgaagaggcccgcaccgatcgcccttcccaacagttgcgcagcctgaatggcgaatggaaattgtaagcgttaatattttgttaaaattcgcgttaaatttttgttaaatcagctcattttttaaccaataggccgaaatcggcaaaatcccttataaatcaaaagaatagaccgagatagggttgagtgttgttccagtttggaacaagagtccactattaaagaacgtggactccaacgtcaaagggcgaaaaaccgtctatcagggcgatggcccactacgtgaaccatcaccctaatcaagttttttggggtcgaggtgccgtaaagcactaaatcggaaccctaaagggagcccccgatttagagcttgacggggaaagccggcgaacgtggcgagaaaggaagggaagaaagcgaaaggagcgggcgctagggcgctggcaagtgtagcggtcacgctgcgcgtaaccaccacacccgccgcgcttaatgcgccgctacagggcgcgtcaggtg

SEQ ID NO: 3241 - DNA, 5195 bp, Artificial Sequence
  Synthetic Construct, AT-84 intein modified protein encoding nucleic acids in pBluescript
gcacttttcggggaaatgtgcgcggaacccctatttgtttatttttctaaatacattcaaatatgtatccgctcatgagacaataaccctgataaatgcttcaataatattgaaaaaggaagagtatgagtattcaacatttccgtgtcgcccttattcccttttttgcggcattttgccttcctgtttttgctcacccagaaacgctggtgaaagtaaaagatgctgaagatcagttgggtgcacgagtgggttacatcgaactggatctcaacagcggtaagatccttgagagttttcgccccgaagaacgttttccaatgatgagcacttttaaagttctgctatgtggcgcggtattatcccgtattgacgccgggcaagagcaactcggtcgccgcatacactattctcagaatgacttggttgagtactcaccagtcacagaaaagcatcttacggatggcatgacagtaagagaattatgcagtgctgccataaccatgagtgataacactgcggccaacttacttctgacaacgatcggaggaccgaaggagctaaccgcttttttgcacaacatgggggatcatgtaactcgccttgatcgttgggaaccggagctgaatgaagccataccaaacgacgagcgtgacaccacgatgcctgtagcaatggcaacaacgttgcgcaaactattaactggcgaactacttactctagcttcccggcaacaattaatagactggatggaggcggataaagttgcaggaccacttctgcgctcggcccttccggctggctggtttattgctgataaatctggagccggtgagcgtgggtctcgcggtatcattgcagcactggggccagatggtaagccctcccgtatcgtagttatctacacgacggggagtcaggcaactatggatgaacgaaatagacagatcgctgagataggtgcctcactgattaagcattggtaactgtcagaccaagtttactcatatatactttagattgatttaaaacttcatttttaatttaaaaggatctaggtgaagatcctttttgataatctcatgaccaaaatcccttaacgtgagttttcgttccactgagcgtcagaccccgtagaaaagatcaaaggatcttcttgagatcctttttttctgcgcgtaatctgctgcttgcaaacaaaaaaaccaccgctaccagcggtggtttgtttgccggatcaagagctaccaactctttttccgaaggtaactggcttcagcagagcgcagataccaaatactgtccttctagtgtagccgtagttaggccaccacttcaagaactctgtagcaccgcctacatacctcgctctgctaatcctgttaccagtggctgctgccagtggcgataagtcgtgtcttaccgggttggactcaagacgatagttaccggataaggcgcagcggtcgggctgaacggggggttcgtgcacacagcccagcttggagcgaacgacctacaccgaactgagatacctacagcgtgagctatgagaaagcgccacgcttcccgaagggagaaaggcggacaggtatccggtaagcggcagggtcggaacaggagagcgcacgagggagcttccagggggaaacgcctggtatctttatagtcctgtcgggtttcgccacctctgacttgagcgtcgatttttgtgatgctcgtcaggggggcggagcctatggaaaaacgccagcaacgcggcctttttacggttcctggccttttgctggccttttgctcacatgttctttcctgcgttatcccctgattctgtggataaccgtattaccgcctttgagtgagctgataccgctcgccgcagccgaacgaccgagcgcagcgagtcagtgagcgaggaagcggaagagcgcccaatacgcaaaccgcctctccccgcgcgttggccgattcattaatgcagctggcacgacaggtttcccgactggaaagcgggcagtgagcgcaacgcaattaatgtgagttagctcactcattaggcaccccaggctttacactttatgcttccggctcgtatgttgtgtggaattgtgagcggataacaatttcacacaggaaacagcatatgcaaacaagcattactctgacatccaacgcatccggtacgtttgacggttactattacgaactctggaaggatactggcaatacaacaatgacggtctacactcaaggtcgcttttcctgccagtggtcgaacatcaataacgcgttgtttaggaccgggaagaaatacaaccagaattggcagtctcttggcacaatccggatcacgtactctgcgacttacaacccaaacgggaactcctacttgtgtatctatggctggtctaccaacccattggtcgagttctacatcgttgagtcctgggggaactggagaccgcctggtgcctgcttcccccctactgaggaggcggttttcaagttcggggataaggttaagatcgctactttcgaggaggtcgctaagaatttcaagttcgagcacaaggtcgagatcgacggcttcaagggggagtacagcattcccaacgacctctacgtgctgaccttcaatgatggcaaggccgagtggacccgggtcacgaagttcctccgcaggaagcacgaggggaagatccgcgtcattaagaccaagacgggcaggacgatcaggaccacgccagagcataagttcttcgtttacaaggacggggagctggtgaagaagagggctgacgagctggagccaggcgatgagctggtgctcctgtggcggttcgagtccgaggagacactcactgagatcaacctcctggaggctttcaaggacctgccacaggaggagaaggagaaggtctacgttcgggggattaaggacctcgatctgacgcctctcaaggagaagtacggcgacaaggtctactactgggcgaggcaggattcgatgccgctctctgtgttctacgagctcaacgtcgacctggataaggagttcaggctgggccgggacgctacaacttacgagctcccatctaagctgaagatcacaccttcactcgccaagctgattggctacttcgtgtcagacgggaactactccgacaaggatctccgcatcactgtgggccacgaggatgtcgagaaggagatcgttaatattctggaggagctcggcctgccatactcgttcctggagtgggaggggaagaccaagcagatcgttattggctctcgcctcctgaggctggtcttcaagcatgttttcaagatcccagagggggctccaaacaagaggctcccggagggcttcctgtccttccccttcgaggctaaggtggctctcctgagcggcctcttcaatggcgacggctacgtggtgcgcggcgagcaccatctgtcgatcgggtacgcgtccacaagcaagggcctcatcagggatattctgtacctcctggcttccctgggcattttcgcccgggtgtaccgcgtccctaaggagaagatgaagggggccaaccacgacctctacaagctgtacatcgcgggcaccgatctcgttcgcctggtggagctcctggagctcagggagggccatcgggagaagctgggcgagatcgggaatcgcaagccggcgagggtgaagaagatcgctgacttctacattgacgttgtggatgaggtcagcgaggaggagtactcgggctacgtttacgatctggaggtggagaatgaggggcatagcttcgttgctgcggatggcatcctcgtttcaaatacgtccctgggccaagtgacaatcgatggcgggacctacgacatctataggacgacacgcgtcaaccagccttccattgtggggacagccacgttcgatcagtactggagcgtgcgcacctctaagcggacttcaggaacagtgaccgtgaccgatcacttccgcgcctgggcgaaccggggcctgaacctcggcacaatagaccaaattacattgtgcgtggagggttaccaaagctctggatcagccaacatcacccagaacaccttctctcagggctcttcttccggcagttcgggtggctcatccggctccacaacgactactcgcatcgagtgtgagaacatgtccttgtccggaccctacgttagcaggatcaccaatccctttaatggtattgcgctgtacgccaacggagacacagcccgcgctaccgttaacttccccgcaagtcgcaactacaatttccgcctgcggggttgcggcaacaacaataatcttgcccgtgtggacctgaggatcgacggacggaccgtcgggaccttttattaccagggcacatacccctgggaggccccaattgacaatgtttatgtcagtgcggggagtcatacagtcgaaatcactgttactgcggataacggcacatgggacgtgtatgccgactacctggtgatacagtgactcgagggggggcccggtacccaattcgccctatagtgagtcgtattacaattcactggccgtcgttttacaacgtcgtgactgggaaaaccctggcgttacccaacttaatcgccttgcagcacatccccctttcgccagctggcgtaatagcgaagaggcccgcaccgatcgcccttcccaacagttgcgcagcctgaatggcgaatggaaattgtaagcgttaatattttgttaaaattcgcgttaaatttttgttaaatcagctcattttttaaccaataggccgaaatcggcaaaatcccttataaatcaaaagaatagaccgagatagggttgagtgttgttccagtttggaacaagagtccactattaaagaacgtggactccaacgtcaaagggcgaaaaaccgtctatcagggcgatggcccactacgtgaaccatcaccctaatcaagttttttggggtcgaggtgccgtaaagcactaaatcggaaccctaaagggagcccccgatttagagcttgacggggaaagccggcgaacgtggcgagaaaggaagggaagaaagcgaaaggagcgggcgctagggcgctggcaagtgtagcggtcacgctgcgcgtaaccaccacacccgccgcgcttaatgcgccgctacagggcgcgtcaggtg

SEQ ID NO: 3242 - DNA, 4385 bp, Artificial Sequence
  Synthetic Construct, AT-85 intein modified protein encoding nucleic acids in pBluescript
gcacttttcggggaaatgtgcgcggaacccctatttgtttatttttctaaatacattcaaatatgtatccgctcatgagacaataaccctgataaatgcttcaataatattgaaaaaggaagagtatgagtattcaacatttccgtgtcgcccttattcccttttttgcggcattttgccttcctgtttttgctcacccagaaacgctggtgaaagtaaaagatgctgaagatcagttgggtgcacgagtgggttacatcgaactggatctcaacagcggtaagatccttgagagttttcgccccgaagaacgttttccaatgatgagcacttttaaagttctgctatgtggcgcggtattatcccgtattgacgccgggcaagagcaactcggtcgccgcatacactattctcagaatgacttggttgagtactcaccagtcacagaaaagcatcttacggatggcatgacagtaagagaattatgcagtgctgccataaccatgagtgataacactgcggccaacttacttctgacaacgatcggaggaccgaaggagctaaccgcttttttgcacaacatgggggatcatgtaactcgccttgatcgttgggaaccggagctgaatgaagccataccaaacgacgagcgtgacaccacgatgcctgtagcaatggcaacaacgttgcgcaaactattaactggcgaactacttactctagcttcccggcaacaattaatagactggatggaggcggataaagttgcaggaccacttctgcgctcggcccttccggctggctggtttattgctgataaatctggagccggtgagcgtgggtctcgcggtatcattgcagcactggggccagatggtaagccctcccgtatcgtagttatctacacgacggggagtcaggcaactatggatgaacgaaatagacagatcgctgagataggtgcctcactgattaagcattggtaactgtcagaccaagtttactcatatatactttagattgatttaaaacttcatttttaatttaaaaggatctaggtgaagatcctttttgataatctcatgaccaaaatcccttaacgtgagttttcgttccactgagcgtcagaccccgtagaaaagatcaaaggatcttcttgagatcctttttttctgcgcgtaatctgctgcttgcaaacaaaaaaaccaccgctaccagcggtggtttgtttgccggatcaagagctaccaactctttttccgaaggtaactggcttcagcagagcgcagataccaaatactgtccttctagtgtagccgtagttaggccaccacttcaagaactctgtagcaccgcctacatacctcgctctgctaatcctgttaccagtggctgctgccagtggcgataagtcgtgtcttaccgggttggactcaagacgatagttaccggataaggcgcagcggtcgggctgaacggggggttcgtgcacacagcccagcttggagcgaacgacctacaccgaactgagatacctacagcgtgagctatgagaaagcgccacgcttcccgaagggagaaaggcggacaggtatccggtaagcggcagggtcggaacaggagagcgcacgagggagcttccagggggaaacgcctggtatctttatagtcctgtcgggtttcgccacctctgacttgagcgtcgatttttgtgatgctcgtcaggggggcggagcctatggaaaaacgccagcaacgcggcctttttacggttcctggccttttgctggccttttgctcacatgttctttcctgcgttatcccctgattctgtggataaccgtattaccgcctttgagtgagctgataccgctcgccgcagccgaacgaccgagcgcagcgagtcagtgagcgaggaagcggaagagcgcccaatacgcaaaccgcctctccccgcgcgttggccgattcattaatgcagctggcacgacaggtttcccgactggaaagcgggcagtgagcgcaacgcaattaatgtgagttagctcactcattaggcaccccaggctttacactttatgcttccggctcgtatgttgtgtggaattgtgagcggataacaatttcacacaggaaacagcatatgcaaacaagcattactctgacatccaacgcatccggtacgtttgacggttactattacgaactctggaaggatactggcaatacaacaatgacggtctacactcaaggtcgcttttcctgccagtggtcgaacatcaataacgcgttgtttaggaccgggaagaaatacaaccagaattggcagtctcttggcacaatccggatcacgtactctgcgacttacaacccaaacgggaactcctacttgtgtatctatggctggtctaccaacccattggtcgagttctacatcgttgagtcctgggggaactggagaccgcctggtgcctgcttcccaggcgatacacgcattctcgttcagattgacggggttcctcagaagattactctcagggagctctacgagctgttcgaggatgagcgctacgagaacatggtttacgtgcgcaagaagccgaagagggagatcaaggtgtacagcattgacctggagacaggcaaggtggtcctgactgacatcgaggatgtcattaaggccccagcgacggaccacctcatcaggttcgagctggaggatgggcggtctttcgagaccacggtggaccatcctgtcctcgtttacgagaacggccggttcatcgagaagcgcgctttcgaggtcaaggagggggacaaggtgctggtctcagagctggagctggttgagcagtccagctcgtctcaggataatccgaagaacgagaatctcggctccccagagcacgaccagctcctggagatcaagaacatcaagtatgtgcgcgcgaatgacgatttcgtgttctcgctcaatgctaagaagtaccacaacgtcatcatcaatgagaacatcgttacacatcagacgtccctgggccaagtgacaatcgatggcgggacctacgacatctataggacgacacgcgtcaaccagccttccattgtggggacagccacgttcgatcagtactggagcgtgcgcacctctaagcggacttcaggaacagtgaccgtgaccgatcacttccgcgcctgggcgaaccggggcctgaacctcggcacaatagaccaaattacattgtgcgtggagggttaccaaagctctggatcagccaacatcacccagaacaccttctctcagggctcttcttccggcagttcgggtggctcatccggctccacaacgactactcgcatcgagtgtgagaacatgtccttgtccggaccctacgttagcaggatcaccaatccctttaatggtattgcgctgtacgccaacggagacacagcccgcgctaccgttaacttccccgcaagtcgcaactacaatttccgcctgcggggttgcggcaacaacaataatcttgcccgtgtggacctgaggatcgacggacggaccgtcgggaccttttattaccagggcacatacccctgggaggccccaattgacaatgtttatgtcagtgcggggagtcatacagtcgaaatcactgttactgcggataacggcacatgggacgtgtatgccgactacctggtgatacagtgactcgagggggggcccggtacccaattcgccctatagtgagtcgtattacaattcactggccgtcgttttacaacgtcgtgactgggaaaaccctggcgttacccaacttaatcgccttgcagcacatccccctttcgccagctggcgtaatagcgaagaggcccgcaccgatcgcccttcccaacagttgcgcagcctgaatggcgaatggaaattgtaagcgttaatattttgttaaaattcgcgttaaatttttgttaaatcagctcattttttaaccaataggccgaaatcggcaaaatcccttataaatcaaaagaatagaccgagatagggttgagtgttgttccagtttggaacaagagtccactattaaagaacgtggactccaacgtcaaagggcgaaaaaccgtctatcagggcgatggcccactacgtgaaccatcaccctaatcaagttttttggggtcgaggtgccgtaaagcactaaatcggaaccctaaagggagcccccgatttagagcttgacggggaaagccggcgaacgtggcgagaaaggaagggaagaaagcgaaaggagcgggcgctagggcgctggcaagtgtagcggtcacgctgcgcgtaaccaccacacccgccgcgcttaatgcgccgctacagggcgcgtcaggtg

SEQ ID NO: 3243 - DNA, 5327 bp, Artificial Sequence
  Synthetic Construct, AT-86 intein modified protein encoding nucleic acids in pBluescript
gcacttttcggggaaatgtgcgcggaacccctatttgtttatttttctaaatacattcaaatatgtatccgctcatgagacaataaccctgataaatgcttcaataatattgaaaaaggaagagtatgagtattcaacatttccgtgtcgcccttattcccttttttgcggcattttgccttcctgtttttgctcacccagaaacgctggtgaaagtaaaagatgctgaagatcagttgggtgcacgagtgggttacatcgaactggatctcaacagcggtaagatccttgagagttttcgccccgaagaacgttttccaatgatgagcacttttaaagttctgctatgtggcgcggtattatcccgtattgacgccgggcaagagcaactcggtcgccgcatacactattctcagaatgacttggttgagtactcaccagtcacagaaaagcatcttacggatggcatgacagtaagagaattatgcagtgctgccataaccatgagtgataacactgcggccaacttacttctgacaacgatcggaggaccgaaggagctaaccgcttttttgcacaacatgggggatcatgtaactcgccttgatcgttgggaaccggagctgaatgaagccataccaaacgacgagcgtgacaccacgatgcctgtagcaatggcaacaacgttgcgcaaactattaactggcgaactacttactctagcttcccggcaacaattaatagactggatggaggcggataaagttgcaggaccacttctgcgctcggcccttccggctggctggtttattgctgataaatctggagccggtgagcgtgggtctcgcggtatcattgcagcactggggccagatggtaagccctcccgtatcgtagttatctacacgacggggagtcaggcaactatggatgaacgaaatagacagatcgctgagataggtgcctcactgattaagcattggtaactgtcagaccaagtttactcatatatactttagattgatttaaaacttcatttttaatttaaaaggatctaggtgaagatcctttttgataatctcatgaccaaaatcccttaacgtgagttttcgttccactgagcgtcagaccccgtagaaaagatcaaaggatcttcttgagatcctttttttctgcgcgtaatctgctgcttgcaaacaaaaaaaccaccgctaccagcggtggtttgtttgccggatcaagagctaccaactctttttccgaaggtaactggcttcagcagagcgcagataccaaatactgtccttctagtgtagccgtagttaggccaccacttcaagaactctgtagcaccgcctacatacctcgctctgctaatcctgttaccagtggctgctgccagtggcgataagtcgtgtcttaccgggttggactcaagacgatagttaccggataaggcgcagcggtcgggctgaacggggggttcgtgcacacagcccagcttggagcgaacgacctacaccgaactgagatacctacagcgtgagctatgagaaagcgccacgcttcccgaagggagaaaggcggacaggtatccggtaagcggcagggtcggaacaggagagcgcacgagggagcttccagggggaaacgcctggtatctttatagtcctgtcgggtttcgccacctctgacttgagcgtcgatttttgtgatgctcgtcaggggggcggagcctatggaaaaacgccagcaacgcggcctttttacggttcctggccttttgctggccttttgctcacatgttctttcctgcgttatcccctgattctgtggataaccgtattaccgcctttgagtgagctgataccgctcgccgcagccgaacgaccgagcgcagcgagtcagtgagcgaggaagcggaagagcgcccaatacgcaaaccgcctctccccgcgcgttggccgattcattaatgcagctggcacgacaggtttcccgactggaaagcgggcagtgagcgcaacgcaattaatgtgagttagctcactcattaggcaccccaggctttacactttatgcttccggctcgtatgttgtgtggaattgtgagcggataacaatttcacacaggaaacagcatatgcaaacaagcattactctgacatccaacgcatccggtacgtttgacggttactattacgaactctggaaggatactggcaatacaacaatgacggtctacactcaaggtcgcttttcctgccagtggtcgaacatcaataacgcgttgtttaggaccgggaagaaatacaaccagaattggcagtctcttggcacaatccggatcacgtactctgcgacttacaacccaaacgggaactcctacttgtgtatctatggctggtctaccaacccattggtcgagttctacatcgttgagtcctgggggaactggagaccgcctggtgcctgcctgacgggggacgctaaggttatcgctaatggggagctgacaacgatcggggagctggtggagcgcatctcaaatggcaagctgggcccaacccccgtccggggcctcacggttctggggatcgacgaggatggcaagctcgtggagctgccagtcgagtatgtgtacaaggacaagaccagcgagctggtcaagatcaggacgaggctcggcagggagctgaaggttaccccataccaccctctcctggtgaaccgcaggaatgggaagatcgagtgggtgaaggctgaggagctgaagccaggcgacaggctcgctattccgtccttcctccccgccatgctgaacgataatcctctcgctgagtggctgggctacttcttcggcaacgggtacacagacagcgaggagcgcgtggtcttcgagtctaagtcaaaggagctcaggaagcggttcatggagctcactaggaagctgttccaggacgccgagatcaaggaggattccggcaaggtttacgtgtccagctcggaggttaagcgcctcgtgaagtcactgaacaaggattccatcccagagcaggcttggaaggggctcaggagcttcctgagggcgtacttcgactgcaatgctgagatcaaggataagatcattgtgtctacggctggcaaggagatcgccgagcagatttcatacgctctcgctggcctggggatcgtggctgaggtcgacgataaggggtcggtcatcatttctgacccggagaacgtttctaggttcctggatgagatcggcttctcagtcgaggagaagaaggaggaggctaaggccctgattaagaagtcgaccctcaacctgggcatctacgtggacaaggagctcatttcctacgtccgggagaagctcaagctgagcttctacgagaatgagacgatgtggtcgccagagaaggcccgcgagatcgcgtggaagctgatgaaggagatctactaccggctcgacgagctggagcgcttcaagaaggcgctctccaagagcgtgatcattgattggtcggaggtcgagaagaagaaggaggagatcagcgagaagacagggatctcggtgaacgagattctggagtacgccaagggcaagaggaagccgtctctggaggagtatgtgaagatcgcgaaggctctcggcgtggagctgaaggagacactggaggcgattttcactttcgggaagaagtacctgggctacgtgatctccgacgagattgagaccctggaggaggtcaggaaggaggagctcaagcggctgaaggagctcctgaacgacgagaagctgaagaagggggtcgcctacctcatcttcctggcgcagaatgagctcctgtgggatgagatcattgaggtcgagaagctcaagggcgacttcgttatctacgatctgcatgttccaaagtaccacaacttcatcgggggcaatctgccaactgttctgcataatacgtccctgggccaagtgacaatcgatggcgggacctacgacatctataggacgacacgcgtcaaccagccttccattgtggggacagccacgttcgatcagtactggagcgtgcgcacctctaagcggacttcaggaacagtgaccgtgaccgatcacttccgcgcctgggcgaaccggggcctgaacctcggcacaatagaccaaattacattgtgcgtggagggttaccaaagctctggatcagccaacatcacccagaacaccttctctcagggctcttcttccggcagttcgggtggctcatccggctccacaacgactactcgcatcgagtgtgagaacatgtccttgtccggaccctacgttagcaggatcaccaatccctttaatggtattgcgctgtacgccaacggagacacagcccgcgctaccgttaacttccccgcaagtcgcaactacaatttccgcctgcggggttgcggcaacaacaataatcttgcccgtgtggacctgaggatcgacggacggaccgtcgggaccttttattaccagggcacatacccctgggaggccccaattgacaatgtttatgtcagtgcggggagtcatacagtcgaaatcactgttactgcggataacggcacatgggacgtgtatgccgactacctggtgatacagtgactcgagggggggcccggtacccaattcgccctatagtgagtcgtattacaattcactggccgtcgttttacaacgtcgtgactgggaaaaccctggcgttacccaacttaatcgccttgcagcacatccccctttcgccagctggcgtaatagcgaagaggcccgcaccgatcgcccttcccaacagttgcgcagcctgaatggcgaatggaaattgtaagcgttaatattttgttaaaattcgcgttaaatttttgttaaatcagctcattttttaaccaataggccgaaatcggcaaaatcccttataaatcaaaagaatagaccgagatagggttgagtgttgttccagtttggaacaagagtccactattaaagaacgtggactccaacgtcaaagggcgaaaaaccgtctatcagggcgatggcccactacgtgaaccatcaccctaatcaagttttttggggtcgaggtgccgtaaagcactaaatcggaaccctaaagggagcccccgatttagagcttgacggggaaagccggcgaacgtggcgagaaaggaagggaagaaagcgaaaggagcgggcgctagggcgctggcaagtgtagcggtcacgctgcgcgtaaccaccacacccgccgcgcttaatgcgccgctacagggcgcgtcaggtg

SEQ ID NO: 3244 - DNA, 5654 bp, Artificial Sequence
  Synthetic Construct, AT-87 intein modified protein encoding nucleic acids in pBluescript
gcacttttcggggaaatgtgcgcggaacccctatttgtttatttttctaaatacattcaaatatgtatccgctcatgagacaataaccctgataaatgcttcaataatattgaaaaaggaagagtatgagtattcaacatttccgtgtcgcccttattcccttttttgcggcattttgccttcctgtttttgctcacccagaaacgctggtgaaagtaaaagatgctgaagatcagttgggtgcacgagtgggttacatcgaactggatctcaacagcggtaagatccttgagagttttcgccccgaagaacgttttccaatgatgagcacttttaaagttctgctatgtggcgcggtattatcccgtattgacgccgggcaagagcaactcggtcgccgcatacactattctcagaatgacttggttgagtactcaccagtcacagaaaagcatcttacggatggcatgacagtaagagaattatgcagtgctgccataaccatgagtgataacactgcggccaacttacttctgacaacgatcggaggaccgaaggagctaaccgcttttttgcacaacatgggggatcatgtaactcgccttgatcgttgggaaccggagctgaatgaagccataccaaacgacgagcgtgacaccacgatgcctgtagcaatggcaacaacgttgcgcaaactattaactggcgaactacttactctagcttcccggcaacaattaatagactggatggaggcggataaagttgcaggaccacttctgcgctcggcccttccggctggctggtttattgctgataaatctggagccggtgagcgtgggtctcgcggtatcattgcagcactggggccagatggtaagccctcccgtatcgtagttatctacacgacggggagtcaggcaactatggatgaacgaaatagacagatcgctgagataggtgcctcactgattaagcattggtaactgtcagaccaagtttactcatatatactttagattgatttaaaacttcatttttaatttaaaaggatctaggtgaagatcctttttgataatctcatgaccaaaatcccttaacgtgagttttcgttccactgagcgtcagaccccgtagaaaagatcaaaggatcttcttgagatcctttttttctgcgcgtaatctgctgcttgcaaacaaaaaaaccaccgctaccagcggtggtttgtttgccggatcaagagctaccaactctttttccgaaggtaactggcttcagcagagcgcagataccaaatactgtccttctagtgtagccgtagttaggccaccacttcaagaactctgtagcaccgcctacatacctcgctctgctaatcctgttaccagtggctgctgccagtggcgataagtcgtgtcttaccgggttggactcaagacgatagttaccggataaggcgcagcggtcgggctgaacggggggttcgtgcacacagcccagcttggagcgaacgacctacaccgaactgagatacctacagcgtgagctatgagaaagcgccacgcttcccgaagggagaaaggcggacaggtatccggtaagcggcagggtcggaacaggagagcgcacgagggagcttccagggggaaacgcctggtatctttatagtcctgtcgggtttcgccacctctgacttgagcgtcgatttttgtgatgctcgtcaggggggcggagcctatggaaaaacgccagcaacgcggcctttttacggttcctggccttttgctggccttttgctcacatgttctttcctgcgttatcccctgattctgtggataaccgtattaccgcctttgagtgagctgataccgctcgccgcagccgaacgaccgagcgcagcgagtcagtgagcgaggaagcggaagagcgcccaatacgcaaaccgcctctccccgcgcgttggccgattcattaatgcagctggcacgacaggtttcccgactggaaagcgggcagtgagcgcaacgcaattaatgtgagttagctcactcattaggcaccccaggctttacactttatgcttccggctcgtatgttgtgtggaattgtgagcggataacaatttcacacaggaaacagcatatgcaaacaagcattactctgacatccaacgcatccggtacgtttgacggttactattacgaactctggaaggatactggcaatacaacaatgacggtctacactcaaggtcgcttttcctgccagtggtcgaacatcaataacgcgttgtttaggaccgggaagaaatacaaccagaattggcagtctcttggcacaatccggatcacgtactctgcgacttacaacccaaacgggaactcctacttgtgtatctatggctggtctaccaacccattggtcgagttctacatcgttgagtcctgggggaactggagaccgcctggtgcctgcgttacaggggacacaaaggtctacacgcctgatgagcgggaggttaagattagggatttcatgaattacttcgagaatgggctgatcaaggaggtgtctaatcgcatcgggagggacacagtcattgccgcggtttccttcaacagccgcatcgtgggccacccagtctacaggctcactctggagtccgggaggatcattgaggccactggcgaccacatgttcctcacccctgaggggtggaagcagacgtacgatatcaaggagggcagcgaggtcctcgttaagccaaccctggagggcacgccttacgagccagaccccagggtcatcattgatatcaaggagttctacaacttcctggagaagatcgagcgcgagcacaacctcaagccactgaaggaggcgaagacgttcagggagctcatcacaaaggacaaggagaagattctgaggagggctctggagctgagggctgagatcgagaacggcctgaccaagcgggaggcggagatcctggagctgatttctgctgatacgtggatccctcgcgctgagctggagaagaaggccaggatctcaaggacccggctgaatcagattctccagcggctggagaagaaggggtacatcgagcggcgcattgagggccgcaagcagttcgtgcggaagatccgcaatggcaagattctccggaacgccatggacatcaagcgcattctggaggaggagttcggcatcaagatttcatacaccacggtcaagaagctcctgtccgggaacgttgatggcatggcgtaccgcatcctcaaggaggtcaaggagaagtggctggttcgctacgacgatgagaaggcggggatcctggctagggtggtcggcttcattctcggcgacgggcacctggctaggaatggccggatctggttcaactccagcaaggaggagctggagatgctggctaacgacctccggaagctcggcctgaagccgtcggagatcattgagcgcgattcgtcttcagagatccaggggcggaaggtgaagggccgcatctacatgctctacgtggacaatgctgccttccatgccctcctgaggttctggaaggtggaggtcgggaacaagaccaagaagggctacacggttccggagtggatcaagaagggcaatctcttcgtcaagagggagttcctcaggggcctgttcggggctgacggcaccaagccctgcgggaagcgctacaacttcaatggcatcaagctggagattcgggctaagaaggagtccctggagcgcacggtggagttcctgaacgacgtcgccgatctcctgagggagttcgacgttgattcgaagatcacagtgtctccgactaaggagggcttcatcattaggctcatcgtgacacccaacgacgccaattacctcaacttcctgacacgggtggggtacgcctacgcgaaggatacttacgccaggctcgtcggcgagtacatccggattaagctcgcgtacaagaacatcattctgcccggcatcgctgagaaggccattgagctggcgacagtcactaacagcacgtacgcggctaaggttctcggcgtgtcgagggacttcgttgtgaatcggctgaaggggacacagatcggcattactagggatttcatgaccttcgaggagttcatgaaggagcgggtgctgaacggctacgtgatcgagaaggtcatcaagaaggagaagctcggctacctggacgtctacgacgttacttgcgctcgggatcatagcttcatttccaatgggctcgtttctcataatacgtccctgggccaagtgacaatcgatggcgggacctacgacatctataggacgacacgcgtcaaccagccttccattgtggggacagccacgttcgatcagtactggagcgtgcgcacctctaagcggacttcaggaacagtgaccgtgaccgatcacttccgcgcctgggcgaaccggggcctgaacctcggcacaatagaccaaattacattgtgcgtggagggttaccaaagctctggatcagccaacatcacccagaacaccttctctcagggctcttcttccggcagttcgggtggctcatccggctccacaacgactactcgcatcgagtgtgagaacatgtccttgtccggaccctacgttagcaggatcaccaatccctttaatggtattgcgctgtacgccaacggagacacagcccgcgctaccgttaacttccccgcaagtcgcaactacaatttccgcctgcggggttgcggcaacaacaataatcttgcccgtgtggacctgaggatcgacggacggaccgtcgggaccttttattaccagggcacatacccctgggaggccccaattgacaatgtttatgtcagtgcggggagtcatacagtcgaaatcactgttactgcggataacggcacatgggacgtgtatgccgactacctggtgatacagtgactcgagggggggcccggtacccaattcgccctatagtgagtcgtattacaattcactggccgtcgttttacaacgtcgtgactgggaaaaccctggcgttacccaacttaatcgccttgcagcacatccccctttcgccagctggcgtaatagcgaagaggcccgcaccgatcgcccttcccaacagttgcgcagcctgaatggcgaatggaaattgtaagcgttaatattttgttaaaattcgcgttaaatttttgttaaatcagctcattttttaaccaataggccgaaatcggcaaaatcccttataaatcaaaagaatagaccgagatagggttgagtgttgttccagtttggaacaagagtccactattaaagaacgtggactccaacgtcaaagggcgaaaaaccgtctatcagggcgatggcccactacgtgaaccatcaccctaatcaagttttttggggtcgaggtgccgtaaagcactaaatcggaaccctaaagggagcccccgatttagagcttgacggggaaagccggcgaacgtggcgagaaaggaagggaagaaagcgaaaggagcgggcgctagggcgctggcaagtgtagcggtcacgctgcgcgtaaccaccacacccgccgcgcttaatgcgccgctacagggcgcgtcaggtg

SEQ ID NO: 3245 - DNA, 5027 bp, Artificial Sequence
  Synthetic Construct, AT-88 intein modified protein encoding nucleic acids in pBluescript
gcacttttcggggaaatgtgcgcggaacccctatttgtttatttttctaaatacattcaaatatgtatccgctcatgagacaataaccctgataaatgcttcaataatattgaaaaaggaagagtatgagtattcaacatttccgtgtcgcccttattcccttttttgcggcattttgccttcctgtttttgctcacccagaaacgctggtgaaagtaaaagatgctgaagatcagttgggtgcacgagtgggttacatcgaactggatctcaacagcggtaagatccttgagagttttcgccccgaagaacgttttccaatgatgagcacttttaaagttctgctatgtggcgcggtattatcccgtattgacgccgggcaagagcaactcggtcgccgcatacactattctcagaatgacttggttgagtactcaccagtcacagaaaagcatcttacggatggcatgacagtaagagaattatgcagtgctgccataaccatgagtgataacactgcggccaacttacttctgacaacgatcggaggaccgaaggagctaaccgcttttttgcacaacatgggggatcatgtaactcgccttgatcgttgggaaccggagctgaatgaagccataccaaacgacgagcgtgacaccacgatgcctgtagcaatggcaacaacgttgcgcaaactattaactggcgaactacttactctagcttcccggcaacaattaatagactggatggaggcggataaagttgcaggaccacttctgcgctcggcccttccggctggctggtttattgctgataaatctggagccggtgagcgtgggtctcgcggtatcattgcagcactggggccagatggtaagccctcccgtatcgtagttatctacacgacggggagtcaggcaactatggatgaacgaaatagacagatcgctgagataggtgcctcactgattaagcattggtaactgtcagaccaagtttactcatatatactttagattgatttaaaacttcatttttaatttaaaaggatctaggtgaagatcctttttgataatctcatgaccaaaatcccttaacgtgagttttcgttccactgagcgtcagaccccgtagaaaagatcaaaggatcttcttgagatcctttttttctgcgcgtaatctgctgcttgcaaacaaaaaaaccaccgctaccagcggtggtttgtttgccggatcaagagctaccaactctttttccgaaggtaactggcttcagcagagcgcagataccaaatactgtccttctagtgtagccgtagttaggccaccacttcaagaactctgtagcaccgcctacatacctcgctctgctaatcctgttaccagtggctgctgccagtggcgataagtcgtgtcttaccgggttggactcaagacgatagttaccggataaggcgcagcggtcgggctgaacggggggttcgtgcacacagcccagcttggagcgaacgacctacaccgaactgagatacctacagcgtgagctatgagaaagcgccacgcttcccgaagggagaaaggcggacaggtatccggtaagcggcagggtcggaacaggagagcgcacgagggagcttccagggggaaacgcctggtatctttatagtcctgtcgggtttcgccacctctgacttgagcgtcgatttttgtgatgctcgtcaggggggcggagcctatggaaaaacgccagcaacgcggcctttttacggttcctggccttttgctggccttttgctcacatgttctttcctgcgttatcccctgattctgtggataaccgtattaccgcctttgagtgagctgataccgctcgccgcagccgaacgaccgagcgcagcgagtcagtgagcgaggaagcggaagagcgcccaatacgcaaaccgcctctccccgcgcgttggccgattcattaatgcagctggcacgacaggtttcccgactggaaagcgggcagtgagcgcaacgcaattaatgtgagttagctcactcattaggcaccccaggctttacactttatgcttccggctcgtatgttgtgtggaattgtgagcggataacaatttcacacaggaaacagcatatgcaaacaagcattactctgacatccaacgcatccggtacgtttgacggttactattacgaactctggaaggatactggcaatacaacaatgacggtctacactcaaggtcgcttttcctgccagtggtcgaacatcaataacgcgttgtttaggaccgggaagaaatacaaccagaattggcagtctcttggcacaatccggatcacgtactctgcgacttacaacccaaacgggaactcctacttgtgtatctatggctggtctaccaacccattggtcgagttctacatcgttgagtcctgggggaactggagaccgcctggtgcctgcatcgatggcaacgctaagattattttcgagaatgagggggaggagcatctgacaactatggctgagatgtacgagcgctaccgccacctcggcgagttctacgacgagaactacaatcgctgggggattgatgtgtccagcgtcccgatctacgtgaagtccttcgacccagagacgaggagggtggtcaagggcagggtccgggccatctggaagtacgagctgggcgaggagattccgaagtacgagatccgcacacacaagggcactaagattctcaccagcccatggcatcctttcttcgtcctgacaccagacttcgaggttatcgagaagagggcggacgagctcaaagtgggcgatatcctgattggcgggatgcctgacggggaggatcacgagctcattttcgactactggctggctggcttcatcgctggcaacgggaatctcgacgattcggagagggagtacaaggcccgcgagctcctggatggcatcgagaacgggattccgcccaagatcctgaggaagggcaagaatgccgtcctctctttcatcacgggcctgttcgacgctgaggggcacgttaacgataagtcaggcattgagctcgggatggtgaataagaagctgatcgaggctgtcacacattacctcaacagcctgggcatcaaggcccgcatgagggagaagcggcgcaagaatggcatcgactacattatgcacgtggaggagtactcgtctctcctgcggttctacgagctcattggcaagcatctgcagaacaatgagaagaaggagaagctggagatcctcctgcacaagcataacggcggggcgttcgatctctcactgaacttcaatgctttcaaggagtgggcctccaggtacggcgtcgagttcaagaccaacgggaatcagatcctcgctatcattggcaacgagaaggttagcctgggccagtggcacgcgagggggcatgtgtcgaaggctgtcctggttaagatgctccggaagctgtacgaggttactaagaacgacgaggtgaaggagatgctccacctgatcgagtccctggaggttgtgaaggagatcaccattacgaacgagcccaagaccttctacgatctgacagtggataagtaccagaactacctcgccggggagaatggcatgattttcgtgcataatacgtccctgggccaagtgacaatcgatggcgggacctacgacatctataggacgacacgcgtcaaccagccttccattgtggggacagccacgttcgatcagtactggagcgtgcgcacctctaagcggacttcaggaacagtgaccgtgaccgatcacttccgcgcctgggcgaaccggggcctgaacctcggcacaatagaccaaattacattgtgcgtggagggttaccaaagctctggatcagccaacatcacccagaacaccttctctcagggctcttcttccggcagttcgggtggctcatccggctccacaacgactactcgcatcgagtgtgagaacatgtccttgtccggaccctacgttagcaggatcaccaatccctttaatggtattgcgctgtacgccaacggagacacagcccgcgctaccgttaacttccccgcaagtcgcaactacaatttccgcctgcggggttgcggcaacaacaataatcttgcccgtgtggacctgaggatcgacggacggaccgtcgggaccttttattaccagggcacatacccctgggaggccccaattgacaatgtttatgtcagtgcggggagtcatacagtcgaaatcactgttactgcggataacggcacatgggacgtgtatgccgactacctggtgatacagtgactcgagggggggcccggtacccaattcgccctatagtgagtcgtattacaattcactggccgtcgttttacaacgtcgtgactgggaaaaccctggcgttacccaacttaatcgccttgcagcacatccccctttcgccagctggcgtaatagcgaagaggcccgcaccgatcgcccttcccaacagttgcgcagcctgaatggcgaatggaaattgtaagcgttaatattttgttaaaattcgcgttaaatttttgttaaatcagctcattttttaaccaataggccgaaatcggcaaaatcccttataaatcaaaagaatagaccgagatagggttgagtgttgttccagtttggaacaagagtccactattaaagaacgtggactccaacgtcaaagggcgaaaaaccgtctatcagggcgatggcccactacgtgaaccatcaccctaatcaagttttttggggtcgaggtgccgtaaagcactaaatcggaaccctaaagggagcccccgatttagagcttgacggggaaagccggcgaacgtggcgagaaaggaagggaagaaagcgaaaggagcgggcgctagggcgctggcaagtgtagcggtcacgctgcgcgtaaccaccacacccgccgcgcttaatgcgccgctacagggcgcgtcaggtg

SEQ ID NO: 3246 - DNA, 5144 bp, Artificial Sequence
  Synthetic Construct, AT-89 intein modified protein encoding nucleic acids in pBluescript
gcacttttcggggaaatgtgcgcggaacccctatttgtttatttttctaaatacattcaaatatgtatccgctcatgagacaataaccctgataaatgcttcaataatattgaaaaaggaagagtatgagtattcaacatttccgtgtcgcccttattcccttttttgcggcattttgccttcctgtttttgctcacccagaaacgctggtgaaagtaaaagatgctgaagatcagttgggtgcacgagtgggttacatcgaactggatctcaacagcggtaagatccttgagagttttcgccccgaagaacgttttccaatgatgagcacttttaaagttctgctatgtggcgcggtattatcccgtattgacgccgggcaagagcaactcggtcgccgcatacactattctcagaatgacttggttgagtactcaccagtcacagaaaagcatcttacggatggcatgacagtaagagaattatgcagtgctgccataaccatgagtgataacactgcggccaacttacttctgacaacgatcggaggaccgaaggagctaaccgcttttttgcacaacatgggggatcatgtaactcgccttgatcgttgggaaccggagctgaatgaagccataccaaacgacgagcgtgacaccacgatgcctgtagcaatggcaacaacgttgcgcaaactattaactggcgaactacttactctagcttcccggcaacaattaatagactggatggaggcggataaagttgcaggaccacttctgcgctcggcccttccggctggctggtttattgctgataaatctggagccggtgagcgtgggtctcgcggtatcattgcagcactggggccagatggtaagccctcccgtatcgtagttatctacacgacggggagtcaggcaactatggatgaacgaaatagacagatcgctgagataggtgcctcactgattaagcattggtaactgtcagaccaagtttactcatatatactttagattgatttaaaacttcatttttaatttaaaaggatctaggtgaagatcctttttgataatctcatgaccaaaatcccttaacgtgagttttcgttccactgagcgtcagaccccgtagaaaagatcaaaggatcttcttgagatcctttttttctgcgcgtaatctgctgcttgcaaacaaaaaaaccaccgctaccagcggtggtttgtttgccggatcaagagctaccaactctttttccgaaggtaactggcttcagcagagcgcagataccaaatactgtccttctagtgtagccgtagttaggccaccacttcaagaactctgtagcaccgcctacatacctcgctctgctaatcctgttaccagtggctgctgccagtggcgataagtcgtgtcttaccgggttggactcaagacgatagttaccggataaggcgcagcggtcgggctgaacggggggttcgtgcacacagcccagcttggagcgaacgacctacaccgaactgagatacctacagcgtgagctatgagaaagcgccacgcttcccgaagggagaaaggcggacaggtatccggtaagcggcagggtcggaacaggagagcgcacgagggagcttccagggggaaacgcctggtatctttatagtcctgtcgggtttcgccacctctgacttgagcgtcgatttttgtgatgctcgtcaggggggcggagcctatggaaaaacgccagcaacgcggcctttttacggttcctggccttttgctggccttttgctcacatgttctttcctgcgttatcccctgattctgtggataaccgtattaccgcctttgagtgagctgataccgctcgccgcagccgaacgaccgagcgcagcgagtcagtgagcgaggaagcggaagagcgcccaatacgcaaaccgcctctccccgcgcgttggccgattcattaatgcagctggcacgacaggtttcccgactggaaagcgggcagtgagcgcaacgcaattaatgtgagttagctcactcattaggcaccccaggctttacactttatgcttccggctcgtatgttgtgtggaattgtgagcggataacaatttcacacaggaaacagcatatgcaaacaagcattactctgacatccaacgcatccggtacgtttgacggttactattacgaactctggaaggatactggcaatacaacaatgacggtctacactcaaggtcgcttttcctgccagtggtcgaacatcaataacgcgttgtttaggaccgggaagaaatacaaccagaattggcagtctcttggcacaatccggatcacgtactctgcgacttacaacccaaacgggaactcctacttgtgtatctatggctggtctaccaacccattggtcgagttctacatcgttgagtcctgggggaactggagaccgcctggtgcctgcttcacaggggacactcgcatcctgacggagaaggggctgattcctattgaggagatcgtgcatgagacgggcaagaagccaaaggtggtcacacacgctggcctcaaggacatcattgagacttacgataacggggagatggaggttttccgcgtgaccacggaggacggctacgagctcaaggtgaccggggaccataagttcctggtcttcgatgagaacggcaatccaacgctcaagcctctgaaggagctcaaagtgggggactacgtctacatcctggctccagagtggaagggcggggagtatgtggagctcgatacaaacatcgagctgaagggcaaggggtacaacgttaatctgccctcgaagctcgacgagaagctggcgtacctcctgggcatcatctacgctgatgggcacatccgccattacttcgagaacggcaagcgcaagaactccaagatcgagatctacctccaccaggacgagaccgagatcaaggagaaggtgaagaggtacttcaaggagatcttcggcattgagccaaaggagttcctcaaggaggagcagcataaggtcatcctggttattccttccacgaagattgtcaagttcctggagatcaacggcctcctgaaggacaagagcgagaatattcgggttccggaggctatcttccgctcccgcccatctgtgatcgctgcgttcctggctggcttcttcgacggcgatgggtcgatcgatcagaactaccggatcgccttcaagtccattagccgcgagttcatcaaggaggctcagctcctgttcctcgccctgggcatcgtgacatccattcaggagtacaacccgcccaatccaaacaataagacagtttacactctccgggtgcagactcgcgacatgaagatcaaggcgttcaacgtcctcaaggagagcgttaagctgtcgaagattatgaaggaggctatctctaagctggaggagaacggcaagaataagaagttctcattcccgttcaacgccatctaccacattaaggaccccaagatcagggcgaagattcagcgggattacaagatcctctcatacaattccaaggtgacccatagggccttcatcaacaatattctcaagctgaaggaggagctcggcctggacgatgaggaggtcaagtacttcgagatgctgagcaagctctacccaaccaagatcacgaagattgagcctctggggaaggcgcacgtctacgatctccaggttgaggatgttcatctgctcacaggcaatggcatctacacaagcaatacgtccctgggccaagtgacaatcgatggcgggacctacgacatctataggacgacacgcgtcaaccagccttccattgtggggacagccacgttcgatcagtactggagcgtgcgcacctctaagcggacttcaggaacagtgaccgtgaccgatcacttccgcgcctgggcgaaccggggcctgaacctcggcacaatagaccaaattacattgtgcgtggagggttaccaaagctctggatcagccaacatcacccagaacaccttctctcagggctcttcttccggcagttcgggtggctcatccggctccacaacgactactcgcatcgagtgtgagaacatgtccttgtccggaccctacgttagcaggatcaccaatccctttaatggtattgcgctgtacgccaacggagacacagcccgcgctaccgttaacttccccgcaagtcgcaactacaatttccgcctgcggggttgcggcaacaacaataatcttgcccgtgtggacctgaggatcgacggacggaccgtcgggaccttttattaccagggcacatacccctgggaggccccaattgacaatgtttatgtcagtgcggggagtcatacagtcgaaatcactgttactgcggataacggcacatgggacgtgtatgccgactacctggtgatacagtgactcgagggggggcccggtacccaattcgccctatagtgagtcgtattacaattcactggccgtcgttttacaacgtcgtgactgggaaaaccctggcgttacccaacttaatcgccttgcagcacatccccctttcgccagctggcgtaatagcgaagaggcccgcaccgatcgcccttcccaacagttgcgcagcctgaatggcgaatggaaattgtaagcgttaatattttgttaaaattcgcgttaaatttttgttaaatcagctcattttttaaccaataggccgaaatcggcaaaatcccttataaatcaaaagaatagaccgagatagggttgagtgttgttccagtttggaacaagagtccactattaaagaacgtggactccaacgtcaaagggcgaaaaaccgtctatcagggcgatggcccactacgtgaaccatcaccctaatcaagttttttggggtcgaggtgccgtaaagcactaaatcggaaccctaaagggagcccccgatttagagcttgacggggaaagccggcgaacgtggcgagaaaggaagggaagaaagcgaaaggagcgggcgctagggcgctggcaagtgtagcggtcacgctgcgcgtaaccaccacacccgccgcgcttaatgcgccgctacagggcgcgtcaggtg

SEQ ID NO: 3247 - DNA, 4976 bp, Artificial Sequence
  Synthetic Construct, AT-90 intein modified protein encoding nucleic acids in pBluescript
gcacttttcggggaaatgtgcgcggaacccctatttgtttatttttctaaatacattcaaatatgtatccgctcatgagacaataaccctgataaatgcttcaataatattgaaaaaggaagagtatgagtattcaacatttccgtgtcgcccttattcccttttttgcggcattttgccttcctgtttttgctcacccagaaacgctggtgaaagtaaaagatgctgaagatcagttgggtgcacgagtgggttacatcgaactggatctcaacagcggtaagatccttgagagttttcgccccgaagaacgttttccaatgatgagcacttttaaagttctgctatgtggcgcggtattatcccgtattgacgccgggcaagagcaactcggtcgccgcatacactattctcagaatgacttggttgagtactcaccagtcacagaaaagcatcttacggatggcatgacagtaagagaattatgcagtgctgccataaccatgagtgataacactgcggccaacttacttctgacaacgatcggaggaccgaaggagctaaccgcttttttgcacaacatgggggatcatgtaactcgccttgatcgttgggaaccggagctgaatgaagccataccaaacgacgagcgtgacaccacgatgcctgtagcaatggcaacaacgttgcgcaaactattaactggcgaactacttactctagcttcccggcaacaattaatagactggatggaggcggataaagttgcaggaccacttctgcgctcggcccttccggctggctggtttattgctgataaatctggagccggtgagcgtgggtctcgcggtatcattgcagcactggggccagatggtaagccctcccgtatcgtagttatctacacgacggggagtcaggcaactatggatgaacgaaatagacagatcgctgagataggtgcctcactgattaagcattggtaactgtcagaccaagtttactcatatatactttagattgatttaaaacttcatttttaatttaaaaggatctaggtgaagatcctttttgataatctcatgaccaaaatcccttaacgtgagttttcgttccactgagcgtcagaccccgtagaaaagatcaaaggatcttcttgagatcctttttttctgcgcgtaatctgctgcttgcaaacaaaaaaaccaccgctaccagcggtggtttgtttgccggatcaagagctaccaactctttttccgaaggtaactggcttcagcagagcgcagataccaaatactgtccttctagtgtagccgtagttaggccaccacttcaagaactctgtagcaccgcctacatacctcgctctgctaatcctgttaccagtggctgctgccagtggcgataagtcgtgtcttaccgggttggactcaagacgatagttaccggataaggcgcagcggtcgggctgaacggggggttcgtgcacacagcccagcttggagcgaacgacctacaccgaactgagatacctacagcgtgagctatgagaaagcgccacgcttcccgaagggagaaaggcggacaggtatccggtaagcggcagggtcggaacaggagagcgcacgagggagcttccagggggaaacgcctggtatctttatagtcctgtcgggtttcgccacctctgacttgagcgtcgatttttgtgatgctcgtcaggggggcggagcctatggaaaaacgccagcaacgcggcctttttacggttcctggccttttgctggccttttgctcacatgttctttcctgcgttatcccctgattctgtggataaccgtattaccgcctttgagtgagctgataccgctcgccgcagccgaacgaccgagcgcagcgagtcagtgagcgaggaagcggaagagcgcccaatacgcaaaccgcctctccccgcgcgttggccgattcattaatgcagctggcacgacaggtttcccgactggaaagcgggcagtgagcgcaacgcaattaatgtgagttagctcactcattaggcaccccaggctttacactttatgcttccggctcgtatgttgtgtggaattgtgagcggataacaatttcacacaggaaacagcatatgcaaacaagcattactctgacatccaacgcatccggtacgtttgacggttactattacgaactctggaaggatactggcaatacaacaatgacggtctacactcaaggtcgcttttcctgccagtggtcgaacatcaataacgcgttgtttaggaccgggaagaaatacaaccagaattggcagtctcttggcacaatccggatcacgtactctgcgacttacaacccaaacgggaactcctacttgtgtatctatggctggtctaccaacccattggtcgagttctacatcgttgagtcctgggggaactggagaccgcctggtgcctgcgtggtcggggagacaaggattctgacgcctgagggctacatcaaggctgaggagctgttcaagctcgccaaggagcggggcaagatggaggccatcgctgtggagggcattgctgagggcggggagccatacgcgtactctctggagatcctcctgcctggcgacaagcaggtcaagtacgagaccgttcacgggaacgctgtggaggtcgccgatccggtttcagtgcccgcctacgtgtggaaggtcggcatgaaggaggttgcccgcgtgaggacaaaggagggctacgagatcaccgccacgctcgaccataagctgatgactccggagggctggaaggagatcaaggacctgaagccaggggataagattctcctgcctaggttcgaggtggaggaggacttcggctccgagagcatcggggaggatctcgcgttcgtcctgggctggttcattggcgacgggtacctcaacgttaaggataagcgggcgtggttctacttcaatgctgagaaggaggaggagatcgcctggaagatccgcgagattctggctaagaggttcgagatcaaggccgagccacaccgctacggcaaccagattaagctcggcgtcagggggaaggcgtacgagtggctggagtccatcgttaagaccaacgagaagaggatcccggagattgtgtaccggctcaagcccaatgagattgcctcattcctcaggggcctgttctccgctgacggctacgtggacaatgatatggctatccgcctcacgtcgaagtctcgggagctcctgcgcgaggtccaggatctcctgctcctgttcggcatcctgtccaagatctacgagaggccgtacaagcgggagttcaagtacaccacgaaggacggcgaggagcgcacatacacaactgaggggtactacgagctcgtgatcgcgaactactcccggaagatcttcgctgagcgcattggcctggaggggtacaagatggagaagctcagcctggagaagatcaaggtcgacgagcccattgtcaccgttgagtcggtggagatcctcggcaagaagctggtctacgacttcactgttccagagcatcacatgtacatttccaatgggttcatgagccacaacacgtccctgggccaagtgacaatcgatggcgggacctacgacatctataggacgacacgcgtcaaccagccttccattgtggggacagccacgttcgatcagtactggagcgtgcgcacctctaagcggacttcaggaacagtgaccgtgaccgatcacttccgcgcctgggcgaaccggggcctgaacctcggcacaatagaccaaattacattgtgcgtggagggttaccaaagctctggatcagccaacatcacccagaacaccttctctcagggctcttcttccggcagttcgggtggctcatccggctccacaacgactactcgcatcgagtgtgagaacatgtccttgtccggaccctacgttagcaggatcaccaatccctttaatggtattgcgctgtacgccaacggagacacagcccgcgctaccgttaacttccccgcaagtcgcaactacaatttccgcctgcggggttgcggcaacaacaataatcttgcccgtgtggacctgaggatcgacggacggaccgtcgggaccttttattaccagggcacatacccctgggaggccccaattgacaatgtttatgtcagtgcggggagtcatacagtcgaaatcactgttactgcggataacggcacatgggacgtgtatgccgactacctggtgatacagtgactcgagggggggcccggtacccaattcgccctatagtgagtcgtattacaattcactggccgtcgttttacaacgtcgtgactgggaaaaccctggcgttacccaacttaatcgccttgcagcacatccccctttcgccagctggcgtaatagcgaagaggcccgcaccgatcgcccttcccaacagttgcgcagcctgaatggcgaatggaaattgtaagcgttaatattttgttaaaattcgcgttaaatttttgttaaatcagctcattttttaaccaataggccgaaatcggcaaaatcccttataaatcaaaagaatagaccgagatagggttgagtgttgttccagtttggaacaagagtccactattaaagaacgtggactccaacgtcaaagggcgaaaaaccgtctatcagggcgatggcccactacgtgaaccatcaccctaatcaagttttttggggtcgaggtgccgtaaagcactaaatcggaaccctaaagggagcccccgatttagagcttgacggggaaagccggcgaacgtggcgagaaaggaagggaagaaagcgaaaggagcgggcgctagggcgctggcaagtgtagcggtcacgctgcgcgtaaccaccacacccgccgcgcttaatgcgccgctacagggcgcgtcaggtg

SEQ ID NO: 3248 - DNA, 5138 bp, Artificial Sequence
  Synthetic Construct, AT-91 intein modified protein encoding nucleic acids in pBluescript
gcacttttcggggaaatgtgcgcggaacccctatttgtttatttttctaaatacattcaaatatgtatccgctcatgagacaataaccctgataaatgcttcaataatattgaaaaaggaagagtatgagtattcaacatttccgtgtcgcccttattcccttttttgcggcattttgccttcctgtttttgctcacccagaaacgctggtgaaagtaaaagatgctgaagatcagttgggtgcacgagtgggttacatcgaactggatctcaacagcggtaagatccttgagagttttcgccccgaagaacgttttccaatgatgagcacttttaaagttctgctatgtggcgcggtattatcccgtattgacgccgggcaagagcaactcggtcgccgcatacactattctcagaatgacttggttgagtactcaccagtcacagaaaagcatcttacggatggcatgacagtaagagaattatgcagtgctgccataaccatgagtgataacactgcggccaacttacttctgacaacgatcggaggaccgaaggagctaaccgcttttttgcacaacatgggggatcatgtaactcgccttgatcgttgggaaccggagctgaatgaagccataccaaacgacgagcgtgacaccacgatgcctgtagcaatggcaacaacgttgcgcaaactattaactggcgaactacttactctagcttcccggcaacaattaatagactggatggaggcggataaagttgcaggaccacttctgcgctcggcccttccggctggctggtttattgctgataaatctggagccggtgagcgtgggtctcgcggtatcattgcagcactggggccagatggtaagccctcccgtatcgtagttatctacacgacggggagtcaggcaactatggatgaacgaaatagacagatcgctgagataggtgcctcactgattaagcattggtaactgtcagaccaagtttactcatatatactttagattgatttaaaacttcatttttaatttaaaaggatctaggtgaagatcctttttgataatctcatgaccaaaatcccttaacgtgagttttcgttccactgagcgtcagaccccgtagaaaagatcaaaggatcttcttgagatcctttttttctgcgcgtaatctgctgcttgcaaacaaaaaaaccaccgctaccagcggtggtttgtttgccggatcaagagctaccaactctttttccgaaggtaactggcttcagcagagcgcagataccaaatactgtccttctagtgtagccgtagttaggccaccacttcaagaactctgtagcaccgcctacatacctcgctctgctaatcctgttaccagtggctgctgccagtggcgataagtcgtgtcttaccgggttggactcaagacgatagttaccggataaggcgcagcggtcgggctgaacggggggttcgtgcacacagcccagcttggagcgaacgacctacaccgaactgagatacctacagcgtgagctatgagaaagcgccacgcttcccgaagggagaaaggcggacaggtatccggtaagcggcagggtcggaacaggagagcgcacgagggagcttccagggggaaacgcctggtatctttatagtcctgtcgggtttcgccacctctgacttgagcgtcgatttttgtgatgctcgtcaggggggcggagcctatggaaaaacgccagcaacgcggcctttttacggttcctggccttttgctggccttttgctcacatgttctttcctgcgttatcccctgattctgtggataaccgtattaccgcctttgagtgagctgataccgctcgccgcagccgaacgaccgagcgcagcgagtcagtgagcgaggaagcggaagagcgcccaatacgcaaaccgcctctccccgcgcgttggccgattcattaatgcagctggcacgacaggtttcccgactggaaagcgggcagtgagcgcaacgcaattaatgtgagttagctcactcattaggcaccccaggctttacactttatgcttccggctcgtatgttgtgtggaattgtgagcggataacaatttcacacaggaaacagcatatgcaaacaagcattactctgacatccaacgcatccggtacgtttgacggttactattacgaactctggaaggatactggcaatacaacaatgacggtctacactcaaggtcgcttttcctgccagtggtcgaacatcaataacgcgttgtttaggaccgggaagaaatacaaccagaattggcagtctcttggcacaatccggatcacgtactctgcgacttacaacccaaacgggaactcctacttgtgtatctatggctggtctaccaacccattggtcgagttctacatcgttgagtcctgggggaactggagaccgcctggtgcctgcctcgcgcctgggtcaaaggtcctcacggagcatggctactggctgaaggtggaggagctgccggagaagttcaagctgcagggcgttaaggtgtacaacctggacgagggccacaacgatacaagcaatgttgctttcgtggctgagagggaggtggagactggcgagatggccgtccgcgttaccacggagtccggcaggatcattgaggggagcgaggaccatccagtcctgacccctgagggctacgtttacctcgggaacctgaaggagggcaatctcgtgattgtctacccgttcgagggggttgagtacgaggagaggaagggcgtgatcctcgacgaggatgcgttcaaggacgaggatccccaggtgctctccttcctgagggagaagggcctcgtcccactgcgctgggacgatccccgcatcgggacaattgctcggatcctgggcttcgctttcggcgacgggtacctcggggagatgggcgggaggctcacactgactttctacggcaaggaggagacgctccgggagctgaagaaggacctggagcgcctgggcatttcggccaacctctacgtgcgcgagtctatcgagacaactagcggccactcggaggggaagtccctcagcatcgagctgcgcgtcacatcgaggtctttcgcgctcttcctggagaagctcggcatgccgagggggaagaagactgagaaggcgtacagggtgccaggctggatcctggaggctcctctgtgggtcaagaggaacttcctcgctgggctgttcgctgctgacggctcgattgtcgagttcaagggcaacaccccgctccccatcaatctgacgcagtcaaagtccgacgagctcgccgagaatctggtggagttcctcggggatgtcgccaagctcctggcggagttcggcatcgagaccacgctgtacgaggttaagtccaagaagggggtgacctaccgcctctctattgtcggcgaggactcaatcaggacgttcgttgagcggatcaattacgagtacgatcccgagaagaaggtgaagggcctgattgctgccgcgtacctcaagctgaaggagaggatcgtgaaggaggcgcatgaggctgtcaaggacgatttcccaaccttcgaggagttcgctaaggagaggggctacgagggcgggttcgtcgctgagaaggtggtcaaggtcgagagggttaagcctgagtacacgaagttctacgatattggggtttaccatgaggctcacaacttcattgctaatggcatcgtcgttcacaacacgtccctgggccaagtgacaatcgatggcgggacctacgacatctataggacgacacgcgtcaaccagccttccattgtggggacagccacgttcgatcagtactggagcgtgcgcacctctaagcggacttcaggaacagtgaccgtgaccgatcacttccgcgcctgggcgaaccggggcctgaacctcggcacaatagaccaaattacattgtgcgtggagggttaccaaagctctggatcagccaacatcacccagaacaccttctctcagggctcttcttccggcagttcgggtggctcatccggctccacaacgactactcgcatcgagtgtgagaacatgtccttgtccggaccctacgttagcaggatcaccaatccctttaatggtattgcgctgtacgccaacggagacacagcccgcgctaccgttaacttccccgcaagtcgcaactacaatttccgcctgcggggttgcggcaacaacaataatcttgcccgtgtggacctgaggatcgacggacggaccgtcgggaccttttattaccagggcacatacccctgggaggccccaattgacaatgtttatgtcagtgcggggagtcatacagtcgaaatcactgttactgcggataacggcacatgggacgtgtatgccgactacctggtgatacagtgactcgagggggggcccggtacccaattcgccctatagtgagtcgtattacaattcactggccgtcgttttacaacgtcgtgactgggaaaaccctggcgttacccaacttaatcgccttgcagcacatccccctttcgccagctggcgtaatagcgaagaggcccgcaccgatcgcccttcccaacagttgcgcagcctgaatggcgaatggaaattgtaagcgttaatattttgttaaaattcgcgttaaatttttgttaaatcagctcattttttaaccaataggccgaaatcggcaaaatcccttataaatcaaaagaatagaccgagatagggttgagtgttgttccagtttggaacaagagtccactattaaagaacgtggactccaacgtcaaagggcgaaaaaccgtctatcagggcgatggcccactacgtgaaccatcaccctaatcaagttttttggggtcgaggtgccgtaaagcactaaatcggaaccctaaagggagcccccgatttagagcttgacggggaaagccggcgaacgtggcgagaaaggaagggaagaaagcgaaaggagcgggcgctagggcgctggcaagtgtagcggtcacgctgcgcgtaaccaccacacccgccgcgcttaatgcgccgctacagggcgcgtcaggtg

SEQ ID NO: 3249 - DNA, 5117 bp, Artificial Sequence
  Synthetic Construct, AT-92 intein modified protein encoding nucleic acids in pBluescript
gcacttttcggggaaatgtgcgcggaacccctatttgtttatttttctaaatacattcaaatatgtatccgctcatgagacaataaccctgataaatgcttcaataatattgaaaaaggaagagtatgagtattcaacatttccgtgtcgcccttattcccttttttgcggcattttgccttcctgtttttgctcacccagaaacgctggtgaaagtaaaagatgctgaagatcagttgggtgcacgagtgggttacatcgaactggatctcaacagcggtaagatccttgagagttttcgccccgaagaacgttttccaatgatgagcacttttaaagttctgctatgtggcgcggtattatcccgtattgacgccgggcaagagcaactcggtcgccgcatacactattctcagaatgacttggttgagtactcaccagtcacagaaaagcatcttacggatggcatgacagtaagagaattatgcagtgctgccataaccatgagtgataacactgcggccaacttacttctgacaacgatcggaggaccgaaggagctaaccgcttttttgcacaacatgggggatcatgtaactcgccttgatcgttgggaaccggagctgaatgaagccataccaaacgacgagcgtgacaccacgatgcctgtagcaatggcaacaacgttgcgcaaactattaactggcgaactacttactctagcttcccggcaacaattaatagactggatggaggcggataaagttgcaggaccacttctgcgctcggcccttccggctggctggtttattgctgataaatctggagccggtgagcgtgggtctcgcggtatcattgcagcactggggccagatggtaagccctcccgtatcgtagttatctacacgacggggagtcaggcaactatggatgaacgaaatagacagatcgctgagataggtgcctcactgattaagcattggtaactgtcagaccaagtttactcatatatactttagattgatttaaaacttcatttttaatttaaaaggatctaggtgaagatcctttttgataatctcatgaccaaaatcccttaacgtgagttttcgttccactgagcgtcagaccccgtagaaaagatcaaaggatcttcttgagatcctttttttctgcgcgtaatctgctgcttgcaaacaaaaaaaccaccgctaccagcggtggtttgtttgccggatcaagagctaccaactctttttccgaaggtaactggcttcagcagagcgcagataccaaatactgtccttctagtgtagccgtagttaggccaccacttcaagaactctgtagcaccgcctacatacctcgctctgctaatcctgttaccagtggctgctgccagtggcgataagtcgtgtcttaccgggttggactcaagacgatagttaccggataaggcgcagcggtcgggctgaacggggggttcgtgcacacagcccagcttggagcgaacgacctacaccgaactgagatacctacagcgtgagctatgagaaagcgccacgcttcccgaagggagaaaggcggacaggtatccggtaagcggcagggtcggaacaggagagcgcacgagggagcttccagggggaaacgcctggtatctttatagtcctgtcgggtttcgccacctctgacttgagcgtcgatttttgtgatgctcgtcaggggggcggagcctatggaaaaacgccagcaacgcggcctttttacggttcctggccttttgctggccttttgctcacatgttctttcctgcgttatcccctgattctgtggataaccgtattaccgcctttgagtgagctgataccgctcgccgcagccgaacgaccgagcgcagcgagtcagtgagcgaggaagcggaagagcgcccaatacgcaaaccgcctctccccgcgcgttggccgattcattaatgcagctggcacgacaggtttcccgactggaaagcgggcagtgagcgcaacgcaattaatgtgagttagctcactcattaggcaccccaggctttacactttatgcttccggctcgtatgttgtgtggaattgtgagcggataacaatttcacacaggaaacagcatatgcaaacaagcattactctgacatccaacgcatccggtacgtttgacggttactattacgaactctggaaggatactggcaatacaacaatgacggtctacactcaaggtcgcttttcctgccagtggtcgaacatcaataacgcgttgtttaggaccgggaagaaatacaaccagaattggcagtctcttggcacaatccggatcacgtactctgcgacttacaacccaaacgggaactcctacttgtgtatctatggctggtctaccaacccattggtcgagttctacatcgttgagtcctgggggaactggagaccgcctggtgcctgcgtggacggggacactctcgtgctgacaaaggagttcgggctcatcaagatcaaggacctctacaagattctggacggcaaggggaagaagacagtgaacggcaatgaggagtggacagagctggagaggccaatcactctgtacggctacaaggacgggaagatcgtcgagattaaggctacccacgtttacaagggcttctccgccgggatgatcgagattcggacccgcacgggccgcaagattaaggtcacgcccatccataagctcttcacaggcagggttactaagaatgggctggagatccgggaggtcatggccaaggacctcaagaagggcgatcggatcattgtggcgaagaagattgatggcggggagcgcgtgaagctgaacatccgcgtcgagcagaagaggggcaagaagatccggattccggacgtcctcgatgagaagctggccgagttcctcggctacctgatcgctgacgggaccctcaagccaaggacggtggccatctacaacaatgatgagtctctcctgcgcagggctaacgagctcgccaatgagctgttcaacattgagggcaagatcgtcaaggggcgcacagttaaggcgctcctgatccactcaaaggctctcgtggagttcttctccaagctgggcgtcccgcgcaacaagaaggccaggacttggaaggtcccgaaggagctcctgatctcagagcccgaggtggtcaaggcgttcattaaggcttacatcatgtgcgacggctactacgatgagaacaagggggagatcgagattgtgaccgctagcgaggaggctgcttacggcttctcgtacctcctggctaagctggggatctacgccatcattcgcgagaagatcattggcgacaaggtctactacagggttgtgatttccggcgagagcaacctggagaagctggggatcgagagggttggccgggggtacacgtcgtacgatatcgtcccagttgaggtggaggagctctacaacgctctgggcaggccttacgctgagctgaagagggcgggcatcgagattcataattacctctcgggggagaacatgtcttacgagatgttcaggaagttcgcgaagttcgtcggcatggaggagatcgctgagaaccacctcacccatgttctgttcgacgagatcgtggagattcggtacatctccgagggccaggaggtgtacgacgttactacggagactcataatttcattgggggcaacatgcctactctgctccacaacacgtccctgggccaagtgacaatcgatggcgggacctacgacatctataggacgacacgcgtcaaccagccttccattgtggggacagccacgttcgatcagtactggagcgtgcgcacctctaagcggacttcaggaacagtgaccgtgaccgatcacttccgcgcctgggcgaaccggggcctgaacctcggcacaatagaccaaattacattgtgcgtggagggttaccaaagctctggatcagccaacatcacccagaacaccttctctcagggctcttcttccggcagttcgggtggctcatccggctccacaacgactactcgcatcgagtgtgagaacatgtccttgtccggaccctacgttagcaggatcaccaatccctttaatggtattgcgctgtacgccaacggagacacagcccgcgctaccgttaacttccccgcaagtcgcaactacaatttccgcctgcggggttgcggcaacaacaataatcttgcccgtgtggacctgaggatcgacggacggaccgtcgggaccttttattaccagggcacatacccctgggaggccccaattgacaatgtttatgtcagtgcggggagtcatacagtcgaaatcactgttactgcggataacggcacatgggacgtgtatgccgactacctggtgatacagtgactcgagggggggcccggtacccaattcgccctatagtgagtcgtattacaattcactggccgtcgttttacaacgtcgtgactgggaaaaccctggcgttacccaacttaatcgccttgcagcacatccccctttcgccagctggcgtaatagcgaagaggcccgcaccgatcgcccttcccaacagttgcgcagcctgaatggcgaatggaaattgtaagcgttaatattttgttaaaattcgcgttaaatttttgttaaatcagctcattttttaaccaataggccgaaatcggcaaaatcccttataaatcaaaagaatagaccgagatagggttgagtgttgttccagtttggaacaagagtccactattaaagaacgtggactccaacgtcaaagggcgaaaaaccgtctatcagggcgatggcccactacgtgaaccatcaccctaatcaagttttttggggtcgaggtgccgtaaagcactaaatcggaaccctaaagggagcccccgatttagagcttgacggggaaagccggcgaacgtggcgagaaaggaagggaagaaagcgaaaggagcgggcgctagggcgctggcaagtgtagcggtcacgctgcgcgtaaccaccacacccgccgcgcttaatgcgccgctacagggcgcgtcaggtg

SEQ ID NO: 3250 - DNA, 5777 bp, Artificial Sequence
  Synthetic Construct, AT-93 intein modified protein encoding nucleic acids in pBluescript
gcacttttcggggaaatgtgcgcggaacccctatttgtttatttttctaaatacattcaaatatgtatccgctcatgagacaataaccctgataaatgcttcaataatattgaaaaaggaagagtatgagtattcaacatttccgtgtcgcccttattcccttttttgcggcattttgccttcctgtttttgctcacccagaaacgctggtgaaagtaaaagatgctgaagatcagttgggtgcacgagtgggttacatcgaactggatctcaacagcggtaagatccttgagagttttcgccccgaagaacgttttccaatgatgagcacttttaaagttctgctatgtggcgcggtattatcccgtattgacgccgggcaagagcaactcggtcgccgcatacactattctcagaatgacttggttgagtactcaccagtcacagaaaagcatcttacggatggcatgacagtaagagaattatgcagtgctgccataaccatgagtgataacactgcggccaacttacttctgacaacgatcggaggaccgaaggagctaaccgcttttttgcacaacatgggggatcatgtaactcgccttgatcgttgggaaccggagctgaatgaagccataccaaacgacgagcgtgacaccacgatgcctgtagcaatggcaacaacgttgcgcaaactattaactggcgaactacttactctagcttcccggcaacaattaatagactggatggaggcggataaagttgcaggaccacttctgcgctcggcccttccggctggctggtttattgctgataaatctggagccggtgagcgtgggtctcgcggtatcattgcagcactggggccagatggtaagccctcccgtatcgtagttatctacacgacggggagtcaggcaactatggatgaacgaaatagacagatcgctgagataggtgcctcactgattaagcattggtaactgtcagaccaagtttactcatatatactttagattgatttaaaacttcatttttaatttaaaaggatctaggtgaagatcctttttgataatctcatgaccaaaatcccttaacgtgagttttcgttccactgagcgtcagaccccgtagaaaagatcaaaggatcttcttgagatcctttttttctgcgcgtaatctgctgcttgcaaacaaaaaaaccaccgctaccagcggtggtttgtttgccggatcaagagctaccaactctttttccgaaggtaactggcttcagcagagcgcagataccaaatactgtccttctagtgtagccgtagttaggccaccacttcaagaactctgtagcaccgcctacatacctcgctctgctaatcctgttaccagtggctgctgccagtggcgataagtcgtgtcttaccgggttggactcaagacgatagttaccggataaggcgcagcggtcgggctgaacggggggttcgtgcacacagcccagcttggagcgaacgacctacaccgaactgagatacctacagcgtgagctatgagaaagcgccacgcttcccgaagggagaaaggcggacaggtatccggtaagcggcagggtcggaacaggagagcgcacgagggagcttccagggggaaacgcctggtatctttatagtcctgtcgggtttcgccacctctgacttgagcgtcgatttttgtgatgctcgtcaggggggcggagcctatggaaaaacgccagcaacgcggcctttttacggttcctggccttttgctggccttttgctcacatgttctttcctgcgttatcccctgattctgtggataaccgtattaccgcctttgagtgagctgataccgctcgccgcagccgaacgaccgagcgcagcgagtcagtgagcgaggaagcggaagagcgcccaatacgcaaaccgcctctccccgcgcgttggccgattcattaatgcagctggcacgacaggtttcccgactggaaagcgggcagtgagcgcaacgcaattaatgtgagttagctcactcattaggcaccccaggctttacactttatgcttccggctcgtatgttgtgtggaattgtgagcggataacaatttcacacaggaaacagcatatgcaaacaagcattactctgacatccaacgcatccggtacgtttgacggttactattacgaactctggaaggatactggcaatacaacaatgacggtctacactcaaggtcgcttttcctgccagtggtcgaacatcaataacgcgttgtttaggaccgggaagaaatacaaccagaattggcagtctcttggcacaatccggatcacgtactctgcgacttacaacccaaacgggaactcctacttgtgtatctatggctggtctaccaacccattggtcgagttctacatcgttgagtcctgggggaactggagaccgcctggtgcctgcctctcgccagatactatggttcgcactactaacggggacaagccaatcagggacatcgcggtcggggatcagctcttcgatcacgaggacaggccagtgcagtgcctcgctgctgaggctatccagacctcccggatgatgaaggttacctacacgggctacaacagcgtgtcgaagtccagcttcacatgcactccagaccacatcatgaccctcgttgcgtacggggtgaagcctttccgccattctaactcaaatagggtgacctggtggacgaggtgcgacaggacggagctgggcgctgatgctgtcgagatcaagtgggatgctgccatgcacgacctctacacagagtaccgcgagcagctgggcaggaggccaactgacgctgaggtccggaagtacctcaaggctatcaccagcacgcgcgtggtcccagattcggaggacgatgactctcagagggtcgaggagacgtaccagtcgcccgttctcattaagctcctggcgaagctgaaggctatggatgtggacgtcgatggcgaggacgagtctgttgtgctcatgctcctgcagcagcacatggaggactacctggagcacatgatcccagagcctgaggatatttccgacgaggataacgatgacctcatcattgacctggatacaaataggaagcggaagatcggcacaatttctactctgtcgtctcgcatctcagacaagactttcaggcagtccccgagcattaagtcatcccccgtgaactctcagcagcagtcacagaatgaggcttcgcagtctaccgtcccgacgtacgcctcggttctcaccgaggatgaccaccgcgagatgttcgcgccagtgcggtcaaagctggctgtccgcgaccctaagtgcaagtgccagaacctctcctgcaagggcctgaggcgcgtcagcacagttttcgagacttcggagcaggctgacctggctctggagctcctgagcggggatcactaccgcgtcgttgacccatgcgccgtgcaggatatggaggtcttcacaatgactctggaggagtaccaggctacctgcacggctcctatgacgcagcataagtccaagctgcgcctctacaggagcccgctcaggttccagccataccagggctcagtgtccccagtcccaatcgacccgttctggttcgggttctggctgggcaacgggaccaagaacaattccgagattacaagcactgatcccgaggttgaggtgtacacgcaggcgctcgtggataggctgaatagggactcgatcccaccaggcaaggctccactgaaggtctctaagtacaagatcgacattggcaccaagcacgtgtacaagggggaggagatcaagaccacgaaggtcgcccatcgcctcagggtcatgagcaccgtttcgaacctggacaagacgcactggaatccagtgcatgatggcctgagggagctcggcctcctgggggacaagtccggcgggatccctgactgctacatgaacgcggatgagaatacaaggctggctgtgctcgccggcctgattgagtcagacggctggctctcccacgggctgaactgctacggcttcgggcagtacacctacgagctcaagaagctggtcgaggacgctcggaagctggctctctcctgcggcatccagtgcaaccccattttcgagaggaagaatggcaaggatcggccagagcctgggtggttcttctacatgggcaggggggtcgagaagttccagccacatctcctgctccctcggaagcgcatgaccatcccgttcacaactagcaagaacagggacgttcggccattcgacgtggaggatgctggcgacggggagttcaggctcattgaggtttcaggggagctcttccagctcgcggataggactgtggttcataatacgtccctgggccaagtgacaatcgatggcgggacctacgacatctataggacgacacgcgtcaaccagccttccattgtggggacagccacgttcgatcagtactggagcgtgcgcacctctaagcggacttcaggaacagtgaccgtgaccgatcacttccgcgcctgggcgaaccggggcctgaacctcggcacaatagaccaaattacattgtgcgtggagggttaccaaagctctggatcagccaacatcacccagaacaccttctctcagggctcttcttccggcagttcgggtggctcatccggctccacaacgactactcgcatcgagtgtgagaacatgtccttgtccggaccctacgttagcaggatcaccaatccctttaatggtattgcgctgtacgccaacggagacacagcccgcgctaccgttaacttccccgcaagtcgcaactacaatttccgcctgcggggttgcggcaacaacaataatcttgcccgtgtggacctgaggatcgacggacggaccgtcgggaccttttattaccagggcacatacccctgggaggccccaattgacaatgtttatgtcagtgcggggagtcatacagtcgaaatcactgttactgcggataacggcacatgggacgtgtatgccgactacctggtgatacagtgactcgagggggggcccggtacccaattcgccctatagtgagtcgtattacaattcactggccgtcgttttacaacgtcgtgactgggaaaaccctggcgttacccaacttaatcgccttgcagcacatccccctttcgccagctggcgtaatagcgaagaggcccgcaccgatcgcccttcccaacagttgcgcagcctgaatggcgaatggaaattgtaagcgttaatattttgttaaaattcgcgttaaatttttgttaaatcagctcattttttaaccaataggccgaaatcggcaaaatcccttataaatcaaaagaatagaccgagatagggttgagtgttgttccagtttggaacaagagtccactattaaagaacgtggactccaacgtcaaagggcgaaaaaccgtctatcagggcgatggcccactacgtgaaccatcaccctaatcaagttttttggggtcgaggtgccgtaaagcactaaatcggaaccctaaagggagcccccgatttagagcttgacggggaaagccggcgaacgtggcgagaaaggaagggaagaaagcgaaaggagcgggcgctagggcgctggcaagtgtagcggtcacgctgcgcgtaaccaccacacccgccgcgcttaatgcgccgctacagggcgcgtcaggtg

SEQ ID NO: 3251 - DNA, 5549 bp, Artificial Sequence
  Synthetic Construct, AT-94 intein modified protein encoding nucleic acids in pBluescript
gcacttttcggggaaatgtgcgcggaacccctatttgtttatttttctaaatacattcaaatatgtatccgctcatgagacaataaccctgataaatgcttcaataatattgaaaaaggaagagtatgagtattcaacatttccgtgtcgcccttattcccttttttgcggcattttgccttcctgtttttgctcacccagaaacgctggtgaaagtaaaagatgctgaagatcagttgggtgcacgagtgggttacatcgaactggatctcaacagcggtaagatccttgagagttttcgccccgaagaacgttttccaatgatgagcacttttaaagttctgctatgtggcgcggtattatcccgtattgacgccgggcaagagcaactcggtcgccgcatacactattctcagaatgacttggttgagtactcaccagtcacagaaaagcatcttacggatggcatgacagtaagagaattatgcagtgctgccataaccatgagtgataacactgcggccaacttacttctgacaacgatcggaggaccgaaggagctaaccgcttttttgcacaacatgggggatcatgtaactcgccttgatcgttgggaaccggagctgaatgaagccataccaaacgacgagcgtgacaccacgatgcctgtagcaatggcaacaacgttgcgcaaactattaactggcgaactacttactctagcttcccggcaacaattaatagactggatggaggcggataaagttgcaggaccacttctgcgctcggcccttccggctggctggtttattgctgataaatctggagccggtgagcgtgggtctcgcggtatcattgcagcactggggccagatggtaagccctcccgtatcgtagttatctacacgacggggagtcaggcaactatggatgaacgaaatagacagatcgctgagataggtgcctcactgattaagcattggtaactgtcagaccaagtttactcatatatactttagattgatttaaaacttcatttttaatttaaaaggatctaggtgaagatcctttttgataatctcatgaccaaaatcccttaacgtgagttttcgttccactgagcgtcagaccccgtagaaaagatcaaaggatcttcttgagatcctttttttctgcgcgtaatctgctgcttgcaaacaaaaaaaccaccgctaccagcggtggtttgtttgccggatcaagagctaccaactctttttccgaaggtaactggcttcagcagagcgcagataccaaatactgtccttctagtgtagccgtagttaggccaccacttcaagaactctgtagcaccgcctacatacctcgctctgctaatcctgttaccagtggctgctgccagtggcgataagtcgtgtcttaccgggttggactcaagacgatagttaccggataaggcgcagcggtcgggctgaacggggggttcgtgcacacagcccagcttggagcgaacgacctacaccgaactgagatacctacagcgtgagctatgagaaagcgccacgcttcccgaagggagaaaggcggacaggtatccggtaagcggcagggtcggaacaggagagcgcacgagggagcttccagggggaaacgcctggtatctttatagtcctgtcgggtttcgccacctctgacttgagcgtcgatttttgtgatgctcgtcaggggggcggagcctatggaaaaacgccagcaacgcggcctttttacggttcctggccttttgctggccttttgctcacatgttctttcctgcgttatcccctgattctgtggataaccgtattaccgcctttgagtgagctgataccgctcgccgcagccgaacgaccgagcgcagcgagtcagtgagcgaggaagcggaagagcgcccaatacgcaaaccgcctctccccgcgcgttggccgattcattaatgcagctggcacgacaggtttcccgactggaaagcgggcagtgagcgcaacgcaattaatgtgagttagctcactcattaggcaccccaggctttacactttatgcttccggctcgtatgttgtgtggaattgtgagcggataacaatttcacacaggaaacagcatatgcaaacaagcattactctgacatccaacgcatccggtacgtttgacggttactattacgaactctggaaggatactggcaatacaacaatgacggtctacactcaaggtcgcttttcctgccagtggtcgaacatcaataacgcgttgtttaggaccgggaagaaatacaaccagaattggcagtctcttggcacaatccggatcacgtactctgcgacttacaacccaaacgggaactcctacttgtgtatctatggctggtctaccaacccattggtcgagttctacatcgttgagtcctgggggaactggagaccgcctggtgcctgcctcgctaaggggacactgctgctgcgctacgatgggacaaaggtggaggtggagaatgttcgggagggggatctgctgctgggcccagacggcgggcctaggagggcgttcaacattgtgggcgggagggaccggctctacaggatcaagatggagggcgggaaggaggatctggtggtcaccccaaatcacatcctggtcctccatcgcgagaagagggacggcgtcgataaggtttacgctaggccattcgctctcccactcctgcaggaggacgccaccgacgatggcgaggatctgtcggagatctctgcgattgagcacttcgacaccatggagatcacggctgctgacttcgcttccctcgatccgaacgagcgcaagctgtacaggctcttcacgagcccaggctacgagctgaatgggaggccagtgcccattgacccgtacttcctgggcctctggctgggggatcgctccaggaccaagtccagcatctacacgaaccacgaggaggagatccgggagttcattgcggaccatgctgccgagctcgatctgcagctcgtgtcatacgtctccaatcgcccatccctcgcggctatgaagaacggcaatcagctgcctctcaggcaccaggctaggcagacgatcaggaagcagcgcattgccgcgaagagcatcacacagccaggcggggctaggtcgtcttcataccctgccaccaacggcgggctgtccagcaatacagtgactagcctccactcgcgggagcgccatccactgtccgagtcgtctgctgccgcgacgatgaacctcctgccacgctccacaagcgtctcgacttctgttgctgcccagcctaagtcatccatgagcacattcatcactgacgctattctcccttcggagagctcgaacatctctgtcatttcagattccggcatcgagattagcaagtcttcaaagatgctgtcggaggaggaggccgacctggatctcttcgacattgattcggaggacgaggagatcgaggacctcgatgagaagaagaacgttagcaatgtggacgagttcccgaagcggcgcaggatccactacctgaggaccggctgccggacgtacggggagctctgcccaggcgaggaggaccagatcctggaggatattgttggcaggccagacgggaccacgtctgtggagtcactcctgctcgctctggaggctctggggctccatacctgcggcacgaacgacagcgggtcggataagaagcggatcccctcagtgtacatgaagaactcccgcgccgtgcgcctggctctgctcgctggcctcatcgactctggcgggtggtatgtggattcagagaacacattcggcttcagccagactgaggactctaattcaaccctgatctgggatgttgtgaccctggctaggagcctcggcttctccgtcagcacaaagcggcgcatgactcacaagccgaccaggacgcagcataaggcgcaggagttcgctcagatttcgggcaacgtcgcggagatcccatctctgctcgctagggagaggggcgttgagaggccaatctcccaggcgcacagcttcaagatcaaggacattcagctggagacagaggccactgagtgggcggggttcagggtggatcaggatcagctctacctcaggcatgacttcctcgttctgcataatacgtccctgggccaagtgacaatcgatggcgggacctacgacatctataggacgacacgcgtcaaccagccttccattgtggggacagccacgttcgatcagtactggagcgtgcgcacctctaagcggacttcaggaacagtgaccgtgaccgatcacttccgcgcctgggcgaaccggggcctgaacctcggcacaatagaccaaattacattgtgcgtggagggttaccaaagctctggatcagccaacatcacccagaacaccttctctcagggctcttcttccggcagttcgggtggctcatccggctccacaacgactactcgcatcgagtgtgagaacatgtccttgtccggaccctacgttagcaggatcaccaatccctttaatggtattgcgctgtacgccaacggagacacagcccgcgctaccgttaacttccccgcaagtcgcaactacaatttccgcctgcggggttgcggcaacaacaataatcttgcccgtgtggacctgaggatcgacggacggaccgtcgggaccttttattaccagggcacatacccctgggaggccccaattgacaatgtttatgtcagtgcggggagtcatacagtcgaaatcactgttactgcggataacggcacatgggacgtgtatgccgactacctggtgatacagtgactcgagggggggcccggtacccaattcgccctatagtgagtcgtattacaattcactggccgtcgttttacaacgtcgtgactgggaaaaccctggcgttacccaacttaatcgccttgcagcacatccccctttcgccagctggcgtaatagcgaagaggcccgcaccgatcgcccttcccaacagttgcgcagcctgaatggcgaatggaaattgtaagcgttaatattttgttaaaattcgcgttaaatttttgttaaatcagctcattttttaaccaataggccgaaatcggcaaaatcccttataaatcaaaagaatagaccgagatagggttgagtgttgttccagtttggaacaagagtccactattaaagaacgtggactccaacgtcaaagggcgaaaaaccgtctatcagggcgatggcccactacgtgaaccatcaccctaatcaagttttttggggtcgaggtgccgtaaagcactaaatcggaaccctaaagggagcccccgatttagagcttgacggggaaagccggcgaacgtggcgagaaaggaagggaagaaagcgaaaggagcgggcgctagggcgctggcaagtgtagcggtcacgctgcgcgtaaccaccacacccgccgcgcttaatgcgccgctacagggcgcgtcaggtg

SEQ ID NO: 3252 - DNA, 4313 bp, Artificial Sequence
  Synthetic Construct, AT-95 intein modified protein encoding nucleic acids in pBluescript
gcacttttcggggaaatgtgcgcggaacccctatttgtttatttttctaaatacattcaaatatgtatccgctcatgagacaataaccctgataaatgcttcaataatattgaaaaaggaagagtatgagtattcaacatttccgtgtcgcccttattcccttttttgcggcattttgccttcctgtttttgctcacccagaaacgctggtgaaagtaaaagatgctgaagatcagttgggtgcacgagtgggttacatcgaactggatctcaacagcggtaagatccttgagagttttcgccccgaagaacgttttccaatgatgagcacttttaaagttctgctatgtggcgcggtattatcccgtattgacgccgggcaagagcaactcggtcgccgcatacactattctcagaatgacttggttgagtactcaccagtcacagaaaagcatcttacggatggcatgacagtaagagaattatgcagtgctgccataaccatgagtgataacactgcggccaacttacttctgacaacgatcggaggaccgaaggagctaaccgcttttttgcacaacatgggggatcatgtaactcgccttgatcgttgggaaccggagctgaatgaagccataccaaacgacgagcgtgacaccacgatgcctgtagcaatggcaacaacgttgcgcaaactattaactggcgaactacttactctagcttcccggcaacaattaatagactggatggaggcggataaagttgcaggaccacttctgcgctcggcccttccggctggctggtttattgctgataaatctggagccggtgagcgtgggtctcgcggtatcattgcagcactggggccagatggtaagccctcccgtatcgtagttatctacacgacggggagtcaggcaactatggatgaacgaaatagacagatcgctgagataggtgcctcactgattaagcattggtaactgtcagaccaagtttactcatatatactttagattgatttaaaacttcatttttaatttaaaaggatctaggtgaagatcctttttgataatctcatgaccaaaatcccttaacgtgagttttcgttccactgagcgtcagaccccgtagaaaagatcaaaggatcttcttgagatcctttttttctgcgcgtaatctgctgcttgcaaacaaaaaaaccaccgctaccagcggtggtttgtttgccggatcaagagctaccaactctttttccgaaggtaactggcttcagcagagcgcagataccaaatactgtccttctagtgtagccgtagttaggccaccacttcaagaactctgtagcaccgcctacatacctcgctctgctaatcctgttaccagtggctgctgccagtggcgataagtcgtgtcttaccgggttggactcaagacgatagttaccggataaggcgcagcggtcgggctgaacggggggttcgtgcacacagcccagcttggagcgaacgacctacaccgaactgagatacctacagcgtgagctatgagaaagcgccacgcttcccgaagggagaaaggcggacaggtatccggtaagcggcagggtcggaacaggagagcgcacgagggagcttccagggggaaacgcctggtatctttatagtcctgtcgggtttcgccacctctgacttgagcgtcgatttttgtgatgctcgtcaggggggcggagcctatggaaaaacgccagcaacgcggcctttttacggttcctggccttttgctggccttttgctcacatgttctttcctgcgttatcccctgattctgtggataaccgtattaccgcctttgagtgagctgataccgctcgccgcagccgaacgaccgagcgcagcgagtcagtgagcgaggaagcggaagagcgcccaatacgcaaaccgcctctccccgcgcgttggccgattcattaatgcagctggcacgacaggtttcccgactggaaagcgggcagtgagcgcaacgcaattaatgtgagttagctcactcattaggcaccccaggctttacactttatgcttccggctcgtatgttgtgtggaattgtgagcggataacaatttcacacaggaaacagcatatgcaaacaagcattactctgacatccaacgcatccggtacgtttgacggttactattacgaactctggaaggatactggcaatacaacaatgacggtctacactcaaggtcgcttttcctgccagtggtcgaacatcaataacgcgttgtttaggaccgggaagaaatacaaccagaattggcagtctcttggcacaatccggatcacgtactctgcgacttacaacccaaacgggaactcctacttgtgtatctatggctggtctaccaacccattggtcgagttctacatcgttgagtcctgggggaactggagaccgcctggtgcctgcctcgctaaggggacaaggctgctgcgctacgatgggacagagatcaacgtggaggacgtgcgggagggggatcagctgctcgggccagacggcgagccaaggagggcgttcaacatcgtttccggcattgaccggctctaccgcgtgaagatcggcggggagaaggaggatctcgtggtcaccccgaaccacattctggtgttctacagggagggcccatccgatgggcctgagaatgcggagcggcagacagtcgagatcactgccgcggagttcgctaccctcagcacggaggagcgctccctgtacagcgcgttcacctcgccagctgtcgagaagggcgctgaggggtcagctgctcagatgcattccttcaaggttgaggacatttcgctggagtctgagaagacggagtgggccggcttcagggtggataaggatcagctctacctcaggcatgattacctcgttctgcataacacgtccctgggccaagtgacaatcgatggcgggacctacgacatctataggacgacacgcgtcaaccagccttccattgtggggacagccacgttcgatcagtactggagcgtgcgcacctctaagcggacttcaggaacagtgaccgtgaccgatcacttccgcgcctgggcgaaccggggcctgaacctcggcacaatagaccaaattacattgtgcgtggagggttaccaaagctctggatcagccaacatcacccagaacaccttctctcagggctcttcttccggcagttcgggtggctcatccggctccacaacgactactcgcatcgagtgtgagaacatgtccttgtccggaccctacgttagcaggatcaccaatccctttaatggtattgcgctgtacgccaacggagacacagcccgcgctaccgttaacttccccgcaagtcgcaactacaatttccgcctgcggggttgcggcaacaacaataatcttgcccgtgtggacctgaggatcgacggacggaccgtcgggaccttttattaccagggcacatacccctgggaggccccaattgacaatgtttatgtcagtgcggggagtcatacagtcgaaatcactgttactgcggataacggcacatgggacgtgtatgccgactacctggtgatacagtgactcgagggggggcccggtacccaattcgccctatagtgagtcgtattacaattcactggccgtcgttttacaacgtcgtgactgggaaaaccctggcgttacccaacttaatcgccttgcagcacatccccctttcgccagctggcgtaatagcgaagaggcccgcaccgatcgcccttcccaacagttgcgcagcctgaatggcgaatggaaattgtaagcgttaatattttgttaaaattcgcgttaaatttttgttaaatcagctcattttttaaccaataggccgaaatcggcaaaatcccttataaatcaaaagaatagaccgagatagggttgagtgttgttccagtttggaacaagagtccactattaaagaacgtggactccaacgtcaaagggcgaaaaaccgtctatcagggcgatggcccactacgtgaaccatcaccctaatcaagttttttggggtcgaggtgccgtaaagcactaaatcggaaccctaaagggagcccccgatttagagcttgacggggaaagccggcgaacgtggcgagaaaggaagggaagaaagcgaaaggagcgggcgctagggcgctggcaagtgtagcggtcacgctgcgcgtaaccaccacacccgccgcgcttaatgcgccgctacagggcgcgtcaggtg

SEQ ID NO: 3253 - DNA, 4931 bp, Artificial Sequence
  Synthetic Construct, AT-96 intein modified protein encoding nucleic acids in pBluescript
gcacttttcggggaaatgtgcgcggaacccctatttgtttatttttctaaatacattcaaatatgtatccgctcatgagacaataaccctgataaatgcttcaataatattgaaaaaggaagagtatgagtattcaacatttccgtgtcgcccttattcccttttttgcggcattttgccttcctgtttttgctcacccagaaacgctggtgaaagtaaaagatgctgaagatcagttgggtgcacgagtgggttacatcgaactggatctcaacagcggtaagatccttgagagttttcgccccgaagaacgttttccaatgatgagcacttttaaagttctgctatgtggcgcggtattatcccgtattgacgccgggcaagagcaactcggtcgccgcatacactattctcagaatgacttggttgagtactcaccagtcacagaaaagcatcttacggatggcatgacagtaagagaattatgcagtgctgccataaccatgagtgataacactgcggccaacttacttctgacaacgatcggaggaccgaaggagctaaccgcttttttgcacaacatgggggatcatgtaactcgccttgatcgttgggaaccggagctgaatgaagccataccaaacgacgagcgtgacaccacgatgcctgtagcaatggcaacaacgttgcgcaaactattaactggcgaactacttactctagcttcccggcaacaattaatagactggatggaggcggataaagttgcaggaccacttctgcgctcggcccttccggctggctggtttattgctgataaatctggagccggtgagcgtgggtctcgcggtatcattgcagcactggggccagatggtaagccctcccgtatcgtagttatctacacgacggggagtcaggcaactatggatgaacgaaatagacagatcgctgagataggtgcctcactgattaagcattggtaactgtcagaccaagtttactcatatatactttagattgatttaaaacttcatttttaatttaaaaggatctaggtgaagatcctttttgataatctcatgaccaaaatcccttaacgtgagttttcgttccactgagcgtcagaccccgtagaaaagatcaaaggatcttcttgagatcctttttttctgcgcgtaatctgctgcttgcaaacaaaaaaaccaccgctaccagcggtggtttgtttgccggatcaagagctaccaactctttttccgaaggtaactggcttcagcagagcgcagataccaaatactgtccttctagtgtagccgtagttaggccaccacttcaagaactctgtagcaccgcctacatacctcgctctgctaatcctgttaccagtggctgctgccagtggcgataagtcgtgtcttaccgggttggactcaagacgatagttaccggataaggcgcagcggtcgggctgaacggggggttcgtgcacacagcccagcttggagcgaacgacctacaccgaactgagatacctacagcgtgagctatgagaaagcgccacgcttcccgaagggagaaaggcggacaggtatccggtaagcggcagggtcggaacaggagagcgcacgagggagcttccagggggaaacgcctggtatctttatagtcctgtcgggtttcgccacctctgacttgagcgtcgatttttgtgatgctcgtcaggggggcggagcctatggaaaaacgccagcaacgcggcctttttacggttcctggccttttgctggccttttgctcacatgttctttcctgcgttatcccctgattctgtggataaccgtattaccgcctttgagtgagctgataccgctcgccgcagccgaacgaccgagcgcagcgagtcagtgagcgaggaagcggaagagcgcccaatacgcaaaccgcctctccccgcgcgttggccgattcattaatgcagctggcacgacaggtttcccgactggaaagcgggcagtgagcgcaacgcaattaatgtgagttagctcactcattaggcaccccaggctttacactttatgcttccggctcgtatgttgtgtggaattgtgagcggataacaatttcacacaggaaacagcatatgcaaacaagcattactctgacatccaacgcatccggtacgtttgacggttactattacgaactctggaaggatactggcaatacaacaatgacggtctacactcaaggtcgcttttcctgccagtggtcgaacatcaataacgcgttgtttaggaccgggaagaaatacaaccagaattggcagtctcttggcacaatccggatcacgtactctgcgacttacaacccaaacgggaactcctacttgtgtatctatggctggtctaccaacccattggtcgagttctacatcgttgagtcctgggggaactggagaccgcctggtgcctgcgtcgcgccagattcgctcgtggtcgtcaatgataaggttcaggagatcggcaagctgacagaggagtgggggcgggaggtcgggttcctggagtactccagcggcatcttctacgctccgtacctcggcagggggatttcactggacctcgttacagggaaggtgaagccgtctgtggtctcaaaagtgtggaagctgaagtcccccgaggagctcgtcaccatcaagaccattacgggcaaggagatcacagtgactccagagaccaagctcctgacgttcaacgggacactggagtggaaggaggcgggcaagatcaagcctggggattacgtgctgactgtcaagaagctccacatcaatggcaagcaggagaccctggacgagaagctcgcctacaagagggggctgagcctctcggatccactggagttcttctcctcctccgagaggactatctccgcgtacctgaagggcattttcgacaaggtcggcaggctcgttggggataccgccgttatcaaggtggacaaggatatggcgaagaggctgcagatcctcctgctcaggctcggcattgtctccagcgttgacgagacgggcaaggtcatcatcgggcgcgagtacatccagaagattctgggctacaacgtttccgttgtgacgcacgaggtcgagctcttcagggagttcatcgccgagatttccaagttctacggcacaagcgaggaggacgtctactcgtctctgcatgagaagggcgagctcgatatcgggactgtcccagttgagctgcctgagggcctccgggaggagatcaatcgcgagagggctacgtacagcgagctggtgaagatcgcccaggagattaaggacgagaagctgtacaacaagctcgcgtggatcctgtcggaggtcacggaggaggaggctaagattaaggagaaagtgaatacactcaaggtcatcctgtcatccgatctcattccggagcgcgtggagtcggtcaagatcattaagtctccgtacccctacgtgtacgatctcacagtggagggctctcattctttcattgctaatggcttcgtggttcataatacgtccctgggccaagtgacaatcgatggcgggacctacgacatctataggacgacacgcgtcaaccagccttccattgtggggacagccacgttcgatcagtactggagcgtgcgcacctctaagcggacttcaggaacagtgaccgtgaccgatcacttccgcgcctgggcgaaccggggcctgaacctcggcacaatagaccaaattacattgtgcgtggagggttaccaaagctctggatcagccaacatcacccagaacaccttctctcagggctcttcttccggcagttcgggtggctcatccggctccacaacgactactcgcatcgagtgtgagaacatgtccttgtccggaccctacgttagcaggatcaccaatccctttaatggtattgcgctgtacgccaacggagacacagcccgcgctaccgttaacttccccgcaagtcgcaactacaatttccgcctgcggggttgcggcaacaacaataatcttgcccgtgtggacctgaggatcgacggacggaccgtcgggaccttttattaccagggcacatacccctgggaggccccaattgacaatgtttatgtcagtgcggggagtcatacagtcgaaatcactgttactgcggataacggcacatgggacgtgtatgccgactacctggtgatacagtgactcgagggggggcccggtacccaattcgccctatagtgagtcgtattacaattcactggccgtcgttttacaacgtcgtgactgggaaaaccctggcgttacccaacttaatcgccttgcagcacatccccctttcgccagctggcgtaatagcgaagaggcccgcaccgatcgcccttcccaacagttgcgcagcctgaatggcgaatggaaattgtaagcgttaatattttgttaaaattcgcgttaaatttttgttaaatcagctcattttttaaccaataggccgaaatcggcaaaatcccttataaatcaaaagaatagaccgagatagggttgagtgttgttccagtttggaacaagagtccactattaaagaacgtggactccaacgtcaaagggcgaaaaaccgtctatcagggcgatggcccactacgtgaaccatcaccctaatcaagttttttggggtcgaggtgccgtaaagcactaaatcggaaccctaaagggagcccccgatttagagcttgacggggaaagccggcgaacgtggcgagaaaggaagggaagaaagcgaaaggagcgggcgctagggcgctggcaagtgtagcggtcacgctgcgcgtaaccaccacacccgccgcgcttaatgcgccgctacagggcgcgtcaggtg

SEQ ID NO: 3254 - DNA, 4991 bp, Artificial Sequence
  Synthetic Construct, AT-97 intein modified protein encoding nucleic acids in pBluescript
gcacttttcggggaaatgtgcgcggaacccctatttgtttatttttctaaatacattcaaatatgtatccgctcatgagacaataaccctgataaatgcttcaataatattgaaaaaggaagagtatgagtattcaacatttccgtgtcgcccttattcccttttttgcggcattttgccttcctgtttttgctcacccagaaacgctggtgaaagtaaaagatgctgaagatcagttgggtgcacgagtgggttacatcgaactggatctcaacagcggtaagatccttgagagttttcgccccgaagaacgttttccaatgatgagcacttttaaagttctgctatgtggcgcggtattatcccgtattgacgccgggcaagagcaactcggtcgccgcatacactattctcagaatgacttggttgagtactcaccagtcacagaaaagcatcttacggatggcatgacagtaagagaattatgcagtgctgccataaccatgagtgataacactgcggccaacttacttctgacaacgatcggaggaccgaaggagctaaccgcttttttgcacaacatgggggatcatgtaactcgccttgatcgttgggaaccggagctgaatgaagccataccaaacgacgagcgtgacaccacgatgcctgtagcaatggcaacaacgttgcgcaaactattaactggcgaactacttactctagcttcccggcaacaattaatagactggatggaggcggataaagttgcaggaccacttctgcgctcggcccttccggctggctggtttattgctgataaatctggagccggtgagcgtgggtctcgcggtatcattgcagcactggggccagatggtaagccctcccgtatcgtagttatctacacgacggggagtcaggcaactatggatgaacgaaatagacagatcgctgagataggtgcctcactgattaagcattggtaactgtcagaccaagtttactcatatatactttagattgatttaaaacttcatttttaatttaaaaggatctaggtgaagatcctttttgataatctcatgaccaaaatcccttaacgtgagttttcgttccactgagcgtcagaccccgtagaaaagatcaaaggatcttcttgagatcctttttttctgcgcgtaatctgctgcttgcaaacaaaaaaaccaccgctaccagcggtggtttgtttgccggatcaagagctaccaactctttttccgaaggtaactggcttcagcagagcgcagataccaaatactgtccttctagtgtagccgtagttaggccaccacttcaagaactctgtagcaccgcctacatacctcgctctgctaatcctgttaccagtggctgctgccagtggcgataagtcgtgtcttaccgggttggactcaagacgatagttaccggataaggcgcagcggtcgggctgaacggggggttcgtgcacacagcccagcttggagcgaacgacctacaccgaactgagatacctacagcgtgagctatgagaaagcgccacgcttcccgaagggagaaaggcggacaggtatccggtaagcggcagggtcggaacaggagagcgcacgagggagcttccagggggaaacgcctggtatctttatagtcctgtcgggtttcgccacctctgacttgagcgtcgatttttgtgatgctcgtcaggggggcggagcctatggaaaaacgccagcaacgcggcctttttacggttcctggccttttgctggccttttgctcacatgttctttcctgcgttatcccctgattctgtggataaccgtattaccgcctttgagtgagctgataccgctcgccgcagccgaacgaccgagcgcagcgagtcagtgagcgaggaagcggaagagcgcccaatacgcaaaccgcctctccccgcgcgttggccgattcattaatgcagctggcacgacaggtttcccgactggaaagcgggcagtgagcgcaacgcaattaatgtgagttagctcactcattaggcaccccaggctttacactttatgcttccggctcgtatgttgtgtggaattgtgagcggataacaatttcacacaggaaacagcatatgcaaacaagcattactctgacatccaacgcatccggtacgtttgacggttactattacgaactctggaaggatactggcaatacaacaatgacggtctacactcaaggtcgcttttcctgccagtggtcgaacatcaataacgcgttgtttaggaccgggaagaaatacaaccagaattggcagtctcttggcacaatccggatcacgtactctgcgacttacaacccaaacgggaactcctacttgtgtatctatggctggtctaccaacccattggtcgagttctacatcgttgagtcctgggggaactggagaccgcctggtgcctgcctgctgccggaggagaaggtcgtgctgcctgagatcgggctggttacgctgcgggagctgttcgagctggctaatgaggtcgttgtcaaggacgaggagaaggaggttcggaagctgggcaagatgctcacaggggttgatgagcgcggcaacgtgaagctcctgaatgccctctacgtgtggagggtcgcgcacaagggcgagatgatccgggttaaggtgaacgggtggtactccgtcaccgttacgccggagcatcccttcctgacgaatagggggtgggtgaaggctggcgagctcaaggagggggactacatcgctattccgcgcagggtctacggcaacgaggatctgatgaagttctcgaagatcgccaaggagctcggcattaagggggacgagaaggagttctacctggccggcgcgtctctcgatatcccgattaaggtgctcttcctggctccctccaagctggtcagcgccttcctccgcggctacttcgacgcgaagggggtggtcagggagaactacatcgaggttccactgttcgaggatctccctctcctgctcctgaggttcggcatcgtctcgcggattgagaagtctaccctcaagatctcaggcaagcgcaacctggagctgttcaggaagcacgtggggttcacggactccgagaaggctaaggccctcgatgagctgatctccaaggccaaggagagcgagaggtacccaattctggaggagctgaggaggctcggcctcctgttcgggttcacacggaacgagctgcgcatcgaggagaatccaacttacgaggtgctgatggagatcctggagcgcattgagaggggctcacctaacctggcggagaagatcgctgtcctggagggccggattaaggaggagaactacctgcgcatcctggaggaggagggcctcattgagaatgggaagctgaccgagctcggcaaggagctcctggaggtctggaggaaccgggagttcgactcgaaggacgttgattacgtgaggaacatcgtggagaatctggtcttcctccccgtcgagaaggttgagcggatcgagtacgagggctacgtctacgacgttactacggagactcataatttcgttgctaatggcatcctcgttcataatacgtccctgggccaagtgacaatcgatggcgggacctacgacatctataggacgacacgcgtcaaccagccttccattgtggggacagccacgttcgatcagtactggagcgtgcgcacctctaagcggacttcaggaacagtgaccgtgaccgatcacttccgcgcctgggcgaaccggggcctgaacctcggcacaatagaccaaattacattgtgcgtggagggttaccaaagctctggatcagccaacatcacccagaacaccttctctcagggctcttcttccggcagttcgggtggctcatccggctccacaacgactactcgcatcgagtgtgagaacatgtccttgtccggaccctacgttagcaggatcaccaatccctttaatggtattgcgctgtacgccaacggagacacagcccgcgctaccgttaacttccccgcaagtcgcaactacaatttccgcctgcggggttgcggcaacaacaataatcttgcccgtgtggacctgaggatcgacggacggaccgtcgggaccttttattaccagggcacatacccctgggaggccccaattgacaatgtttatgtcagtgcggggagtcatacagtcgaaatcactgttactgcggataacggcacatgggacgtgtatgccgactacctggtgatacagtgactcgagggggggcccggtacccaattcgccctatagtgagtcgtattacaattcactggccgtcgttttacaacgtcgtgactgggaaaaccctggcgttacccaacttaatcgccttgcagcacatccccctttcgccagctggcgtaatagcgaagaggcccgcaccgatcgcccttcccaacagttgcgcagcctgaatggcgaatggaaattgtaagcgttaatattttgttaaaattcgcgttaaatttttgttaaatcagctcattttttaaccaataggccgaaatcggcaaaatcccttataaatcaaaagaatagaccgagatagggttgagtgttgttccagtttggaacaagagtccactattaaagaacgtggactccaacgtcaaagggcgaaaaaccgtctatcagggcgatggcccactacgtgaaccatcaccctaatcaagttttttggggtcgaggtgccgtaaagcactaaatcggaaccctaaagggagcccccgatttagagcttgacggggaaagccggcgaacgtggcgagaaaggaagggaagaaagcgaaaggagcgggcgctagggcgctggcaagtgtagcggtcacgctgcgcgtaaccaccacacccgccgcgcttaatgcgccgctacagggcgcgtcaggtg

SEQ ID NO: 3255 - DNA, 5396 bp, Artificial Sequence
  Synthetic Construct, AT-98 intein modified protein encoding nucleic acids in pBluescript
gcacttttcggggaaatgtgcgcggaacccctatttgtttatttttctaaatacattcaaatatgtatccgctcatgagacaataaccctgataaatgcttcaataatattgaaaaaggaagagtatgagtattcaacatttccgtgtcgcccttattcccttttttgcggcattttgccttcctgtttttgctcacccagaaacgctggtgaaagtaaaagatgctgaagatcagttgggtgcacgagtgggttacatcgaactggatctcaacagcggtaagatccttgagagttttcgccccgaagaacgttttccaatgatgagcacttttaaagttctgctatgtggcgcggtattatcccgtattgacgccgggcaagagcaactcggtcgccgcatacactattctcagaatgacttggttgagtactcaccagtcacagaaaagcatcttacggatggcatgacagtaagagaattatgcagtgctgccataaccatgagtgataacactgcggccaacttacttctgacaacgatcggaggaccgaaggagctaaccgcttttttgcacaacatgggggatcatgtaactcgccttgatcgttgggaaccggagctgaatgaagccataccaaacgacgagcgtgacaccacgatgcctgtagcaatggcaacaacgttgcgcaaactattaactggcgaactacttactctagcttcccggcaacaattaatagactggatggaggcggataaagttgcaggaccacttctgcgctcggcccttccggctggctggtttattgctgataaatctggagccggtgagcgtgggtctcgcggtatcattgcagcactggggccagatggtaagccctcccgtatcgtagttatctacacgacggggagtcaggcaactatggatgaacgaaatagacagatcgctgagataggtgcctcactgattaagcattggtaactgtcagaccaagtttactcatatatactttagattgatttaaaacttcatttttaatttaaaaggatctaggtgaagatcctttttgataatctcatgaccaaaatcccttaacgtgagttttcgttccactgagcgtcagaccccgtagaaaagatcaaaggatcttcttgagatcctttttttctgcgcgtaatctgctgcttgcaaacaaaaaaaccaccgctaccagcggtggtttgtttgccggatcaagagctaccaactctttttccgaaggtaactggcttcagcagagcgcagataccaaatactgtccttctagtgtagccgtagttaggccaccacttcaagaactctgtagcaccgcctacatacctcgctctgctaatcctgttaccagtggctgctgccagtggcgataagtcgtgtcttaccgggttggactcaagacgatagttaccggataaggcgcagcggtcgggctgaacggggggttcgtgcacacagcccagcttggagcgaacgacctacaccgaactgagatacctacagcgtgagctatgagaaagcgccacgcttcccgaagggagaaaggcggacaggtatccggtaagcggcagggtcggaacaggagagcgcacgagggagcttccagggggaaacgcctggtatctttatagtcctgtcgggtttcgccacctctgacttgagcgtcgatttttgtgatgctcgtcaggggggcggagcctatggaaaaacgccagcaacgcggcctttttacggttcctggccttttgctggccttttgctcacatgttctttcctgcgttatcccctgattctgtggataaccgtattaccgcctttgagtgagctgataccgctcgccgcagccgaacgaccgagcgcagcgagtcagtgagcgaggaagcggaagagcgcccaatacgcaaaccgcctctccccgcgcgttggccgattcattaatgcagctggcacgacaggtttcccgactggaaagcgggcagtgagcgcaacgcaattaatgtgagttagctcactcattaggcaccccaggctttacactttatgcttccggctcgtatgttgtgtggaattgtgagcggataacaatttcacacaggaaacagcatatgcaaacaagcattactctgacatccaacgcatccggtacgtttgacggttactattacgaactctggaaggatactggcaatacaacaatgacggtctacactcaaggtcgcttttcctgccagtggtcgaacatcaataacgcgttgtttaggaccgggaagaaatacaaccagaattggcagtctcttggcacaatccggatcacgtactctgcgacttacaacccaaacgggaactcctacttgtgtatctatggctggtctaccaacccattggtcgagttctacatcgttgagtcctgggggaactggagaccgcctggtgccgctctctacgatttctcggttattcagctctctaatgggcggttcgttctcatcggggatctcgtggaggagctgttcaagaagtacgccgagaagatcaagacctacaaggacctggagtacattgagctgaacgaggaggataggttcgaggtggtctcagtctccccggacctcaaggcgaataagcacgttgtgtctcgggtgtggaggaggaaggtccgcgagggggagaagctgatccgcattaagaccaggacgggcaacgagatcattctcacacgcaatcatcccctgttcgccttcagcaacggggatgtcgttaggaaggaggctgagaagctcaaagtgggcgacagggttgccgtgatgatgcggccgccctcaccacctcagactaaggcggtggtcgacccagctatctacgttaagatttccgattactacctggtgccaaacggcaaggggatgatcaaggtccctaatgacggcattccgcccgagaaggcccagtacctcctgtctgtgaactcataccccgttaagctcgtgagggaggtcgatgagaagctcagctacctggctggggtcatcctgggcgacgggtacatttccagcaatggctactacatctcggcgaccttcgacgatgaggcgtacatggacgctttcgtctccgttgtgagcgatttcatcccaaactacgtgccttccattaggaagaatggggactacacaatcgtcactgttggctctaagattttcgccgagatgctctcacggatcttcggcattccgcgcgggaggaagtccatgtgggacatccccgatgtcgttctcagcaacgacgatctgatgcgctacttcatcgccggcctcttcgacgcggatggctacgtggacgagaatggcccgagcatcgtgctggtcaccaagtcggagacggtcgccaggaagatctggtatgtgctccagcggctgggcatcatttcgacggtttctcgggtgaagtcgcgcggcttcaaggagggggagctcttccgggttatcatttctggcgtggaggatctcgctaagttcgccaagttcatcccactgaggcactcccggaagcgcgctaagctcatggagatcctgcgcacaaagaagccttacaggggcaggcgcacttacagggtcccaatctcgtctgacatgattgctccactgaggcagatgctcgggctgaccgtggctgagctctcaaagctggcctcctactacgcgggcgagaaggtcagcgagtcgctcatccgccatattgagaaggggagggtgaaggagatcaggaggtcgacgctgaagggcatcgctctcgctctgcagcagattgctaaggatgtgggcaacgaggaggcttgggtcagggctaagaggctccagctgatcgctgagggcgacgtctactgggatgaggtggtcagcgtcgaggaggttgacccgaaggagctgggcatcgagtatgtgtacgatctcacagtggaggatgatcataactacgttgctaatggcattctcgtttctaatacgtccctgggccaagtgacaatcgatggcgggacctacgacatctataggacgacacgcgtcaaccagccttccattgtggggacagccacgttcgatcagtactggagcgtgcgcacctctaagcggacttcaggaacagtgaccgtgaccgatcacttccgcgcctgggcgaaccggggcctgaacctcggcacaatagaccaaattacattgtgcgtggagggttaccaaagctctggatcagccaacatcacccagaacaccttctctcagggctcttcttccggcagttcgggtggctcatccggctccacaacgactactcgcatcgagtgtgagaacatgtccttgtccggaccctacgttagcaggatcaccaatccctttaatggtattgcgctgtacgccaacggagacacagcccgcgctaccgttaacttccccgcaagtcgcaactacaatttccgcctgcggggttgcggcaacaacaataatcttgcccgtgtggacctgaggatcgacggacggaccgtcgggaccttttattaccagggcacatacccctgggaggccccaattgacaatgtttatgtcagtgcggggagtcatacagtcgaaatcactgttactgcggataacggcacatgggacgtgtatgccgactacctggtgatacagtgactcgagggggggcccggtacccaattcgccctatagtgagtcgtattacaattcactggccgtcgttttacaacgtcgtgactgggaaaaccctggcgttacccaacttaatcgccttgcagcacatccccctttcgccagctggcgtaatagcgaagaggcccgcaccgatcgcccttcccaacagttgcgcagcctgaatggcgaatggaaattgtaagcgttaatattttgttaaaattcgcgttaaatttttgttaaatcagctcattttttaaccaataggccgaaatcggcaaaatcccttataaatcaaaagaatagaccgagatagggttgagtgttgttccagtttggaacaagagtccactattaaagaacgtggactccaacgtcaaagggcgaaaaaccgtctatcagggcgatggcccactacgtgaaccatcaccctaatcaagttttttggggtcgaggtgccgtaaagcactaaatcggaaccctaaagggagcccccgatttagagcttgacggggaaagccggcgaacgtggcgagaaaggaagggaagaaagcgaaaggagcgggcgctagggcgctggcaagtgtagcggtcacgctgcgcgtaaccaccacacccgccgcgcttaatgcgccgctacagggcgcgtcaggtg

SEQ ID NO: 3256 - DNA, 5033 bp, Artificial Sequence
  Synthetic Construct, AT-99 intein modified protein encoding nucleic acids in pBluescript
gcacttttcggggaaatgtgcgcggaacccctatttgtttatttttctaaatacattcaaatatgtatccgctcatgagacaataaccctgataaatgcttcaataatattgaaaaaggaagagtatgagtattcaacatttccgtgtcgcccttattcccttttttgcggcattttgccttcctgtttttgctcacccagaaacgctggtgaaagtaaaagatgctgaagatcagttgggtgcacgagtgggttacatcgaactggatctcaacagcggtaagatccttgagagttttcgccccgaagaacgttttccaatgatgagcacttttaaagttctgctatgtggcgcggtattatcccgtattgacgccgggcaagagcaactcggtcgccgcatacactattctcagaatgacttggttgagtactcaccagtcacagaaaagcatcttacggatggcatgacagtaagagaattatgcagtgctgccataaccatgagtgataacactgcggccaacttacttctgacaacgatcggaggaccgaaggagctaaccgcttttttgcacaacatgggggatcatgtaactcgccttgatcgttgggaaccggagctgaatgaagccataccaaacgacgagcgtgacaccacgatgcctgtagcaatggcaacaacgttgcgcaaactattaactggcgaactacttactctagcttcccggcaacaattaatagactggatggaggcggataaagttgcaggaccacttctgcgctcggcccttccggctggctggtttattgctgataaatctggagccggtgagcgtgggtctcgcggtatcattgcagcactggggccagatggtaagccctcccgtatcgtagttatctacacgacggggagtcaggcaactatggatgaacgaaatagacagatcgctgagataggtgcctcactgattaagcattggtaactgtcagaccaagtttactcatatatactttagattgatttaaaacttcatttttaatttaaaaggatctaggtgaagatcctttttgataatctcatgaccaaaatcccttaacgtgagttttcgttccactgagcgtcagaccccgtagaaaagatcaaaggatcttcttgagatcctttttttctgcgcgtaatctgctgcttgcaaacaaaaaaaccaccgctaccagcggtggtttgtttgccggatcaagagctaccaactctttttccgaaggtaactggcttcagcagagcgcagataccaaatactgtccttctagtgtagccgtagttaggccaccacttcaagaactctgtagcaccgcctacatacctcgctctgctaatcctgttaccagtggctgctgccagtggcgataagtcgtgtcttaccgggttggactcaagacgatagttaccggataaggcgcagcggtcgggctgaacggggggttcgtgcacacagcccagcttggagcgaacgacctacaccgaactgagatacctacagcgtgagctatgagaaagcgccacgcttcccgaagggagaaaggcggacaggtatccggtaagcggcagggtcggaacaggagagcgcacgagggagcttccagggggaaacgcctggtatctttatagtcctgtcgggtttcgccacctctgacttgagcgtcgatttttgtgatgctcgtcaggggggcggagcctatggaaaaacgccagcaacgcggcctttttacggttcctggccttttgctggccttttgctcacatgttctttcctgcgttatcccctgattctgtggataaccgtattaccgcctttgagtgagctgataccgctcgccgcagccgaacgaccgagcgcagcgagtcagtgagcgaggaagcggaagagcgcccaatacgcaaaccgcctctccccgcgcgttggccgattcattaatgcagctggcacgacaggtttcccgactggaaagcgggcagtgagcgcaacgcaattaatgtgagttagctcactcattaggcaccccaggctttacactttatgcttccggctcgtatgttgtgtggaattgtgagcggataacaatttcacacaggaaacagcatatgcaaacaagcattactctgacatccaacgcatccggtacgtttgacggttactattacgaactctggaaggatactggcaatacaacaatgacggtctacactcaaggtcgcttttcctgccagtggtcgaacatcaataacgcgttgtttaggaccgggaagaaatacaaccagaattggcagtctcttggcacaatccggatcacgtactctgcgacttacaacccaaacgggaactcctacttgtgtatctatggctggtctaccaacccattggtcgagttctacatcgttgagtcctgggggaactggagaccgcctggtgcctgcttctcgggggaggaggttattctcattgagaaggacggggagaagaaggttttcaagctgcgggagttcgtggacgggctgctgaaggaggcttctggcgaggggatggacggctcaatccgggtggtctacaaggatctccagggcgagaacatcaagattctcaccaaggatgggctggtgaagctcctctacgtgaaccgcagggaggggaagcagaagctcaggaagatcgttaatctggagaaggactactggctcgccctgaccccggagcacaaggtctacacgatcaagggcctgaaggaggcgggggagattaccaaggacgatgagatcattcgcgtcccgctcacgatcctggacggcttcgatgttgcggagaagtccattagggaggagctggagaggctgagcctcctgcccctcaactcagaggattccaggctggagaagatcgcgggcattatgggggctctcttcggctcgggcgggatcgacgagaacctcaatacactgtctttcgtgtccagcgagaagaagactatcgagcagttcgtcaaggctctcagcgagctgttcggcgagttcgactacaagatcgaggagaaggagaactccatcatcttccgcacctgcgataagcggatcgtgacattcttcgctactctgggcgccccagttggggacaagtcaaaggtgaagctcaagctgccatggtgggtcaagctcaagccttccctcttcctggccttcatggacggcctgtactcgtctaaccgcaatgataaggagatcctggagattacccagctgacggacaacgtggagacattcttcgaggagatcagctggtacctctcgttcttcggcattaaggccgaggcggaggaggacgaggagaaggataagtacagggctcggctcactctgtcatccagcatcgacaacatgctgaatttcattgagttcatcccgatttcgttctctcccgccaagagggagaagttcttcaaggagatcgagaagtacctggagtactccattcccgagaagacggaggacctgaagaagcgcgtcaagagggttaagaagggcgagcggcgcaacttcctggagtcctgggaggaggttgaggtgacctacaatgttactacggagacaggcaatctgctcgctaatgggctcttcgttaagaacacgtccctgggccaagtgacaatcgatggcgggacctacgacatctataggacgacacgcgtcaaccagccttccattgtggggacagccacgttcgatcagtactggagcgtgcgcacctctaagcggacttcaggaacagtgaccgtgaccgatcacttccgcgcctgggcgaaccggggcctgaacctcggcacaatagaccaaattacattgtgcgtggagggttaccaaagctctggatcagccaacatcacccagaacaccttctctcagggctcttcttccggcagttcgggtggctcatccggctccacaacgactactcgcatcgagtgtgagaacatgtccttgtccggaccctacgttagcaggatcaccaatccctttaatggtattgcgctgtacgccaacggagacacagcccgcgctaccgttaacttccccgcaagtcgcaactacaatttccgcctgcggggttgcggcaacaacaataatcttgcccgtgtggacctgaggatcgacggacggaccgtcgggaccttttattaccagggcacatacccctgggaggccccaattgacaatgtttatgtcagtgcggggagtcatacagtcgaaatcactgttactgcggataacggcacatgggacgtgtatgccgactacctggtgatacagtgactcgagggggggcccggtacccaattcgccctatagtgagtcgtattacaattcactggccgtcgttttacaacgtcgtgactgggaaaaccctggcgttacccaacttaatcgccttgcagcacatccccctttcgccagctggcgtaatagcgaagaggcccgcaccgatcgcccttcccaacagttgcgcagcctgaatggcgaatggaaattgtaagcgttaatattttgttaaaattcgcgttaaatttttgttaaatcagctcattttttaaccaataggccgaaatcggcaaaatcccttataaatcaaaagaatagaccgagatagggttgagtgttgttccagtttggaacaagagtccactattaaagaacgtggactccaacgtcaaagggcgaaaaaccgtctatcagggcgatggcccactacgtgaaccatcaccctaatcaagttttttggggtcgaggtgccgtaaagcactaaatcggaaccctaaagggagcccccgatttagagcttgacggggaaagccggcgaacgtggcgagaaaggaagggaagaaagcgaaaggagcgggcgctagggcgctggcaagtgtagcggtcacgctgcgcgtaaccaccacacccgccgcgcttaatgcgccgctacagggcgcgtcaggtg

SEQ ID NO: 3257 - DNA, 5405 bp, Artificial Sequence
  Synthetic Construct, AT-100 intein modified protein encoding nucleic acids in pBluescript
gcacttttcggggaaatgtgcgcggaacccctatttgtttatttttctaaatacattcaaatatgtatccgctcatgagacaataaccctgataaatgcttcaataatattgaaaaaggaagagtatgagtattcaacatttccgtgtcgcccttattcccttttttgcggcattttgccttcctgtttttgctcacccagaaacgctggtgaaagtaaaagatgctgaagatcagttgggtgcacgagtgggttacatcgaactggatctcaacagcggtaagatccttgagagttttcgccccgaagaacgttttccaatgatgagcacttttaaagttctgctatgtggcgcggtattatcccgtattgacgccgggcaagagcaactcggtcgccgcatacactattctcagaatgacttggttgagtactcaccagtcacagaaaagcatcttacggatggcatgacagtaagagaattatgcagtgctgccataaccatgagtgataacactgcggccaacttacttctgacaacgatcggaggaccgaaggagctaaccgcttttttgcacaacatgggggatcatgtaactcgccttgatcgttgggaaccggagctgaatgaagccataccaaacgacgagcgtgacaccacgatgcctgtagcaatggcaacaacgttgcgcaaactattaactggcgaactacttactctagcttcccggcaacaattaatagactggatggaggcggataaagttgcaggaccacttctgcgctcggcccttccggctggctggtttattgctgataaatctggagccggtgagcgtgggtctcgcggtatcattgcagcactggggccagatggtaagccctcccgtatcgtagttatctacacgacggggagtcaggcaactatggatgaacgaaatagacagatcgctgagataggtgcctcactgattaagcattggtaactgtcagaccaagtttactcatatatactttagattgatttaaaacttcatttttaatttaaaaggatctaggtgaagatcctttttgataatctcatgaccaaaatcccttaacgtgagttttcgttccactgagcgtcagaccccgtagaaaagatcaaaggatcttcttgagatcctttttttctgcgcgtaatctgctgcttgcaaacaaaaaaaccaccgctaccagcggtggtttgtttgccggatcaagagctaccaactctttttccgaaggtaactggcttcagcagagcgcagataccaaatactgtccttctagtgtagccgtagttaggccaccacttcaagaactctgtagcaccgcctacatacctcgctctgctaatcctgttaccagtggctgctgccagtggcgataagtcgtgtcttaccgggttggactcaagacgatagttaccggataaggcgcagcggtcgggctgaacggggggttcgtgcacacagcccagcttggagcgaacgacctacaccgaactgagatacctacagcgtgagctatgagaaagcgccacgcttcccgaagggagaaaggcggacaggtatccggtaagcggcagggtcggaacaggagagcgcacgagggagcttccagggggaaacgcctggtatctttatagtcctgtcgggtttcgccacctctgacttgagcgtcgatttttgtgatgctcgtcaggggggcggagcctatggaaaaacgccagcaacgcggcctttttacggttcctggccttttgctggccttttgctcacatgttctttcctgcgttatcccctgattctgtggataaccgtattaccgcctttgagtgagctgataccgctcgccgcagccgaacgaccgagcgcagcgagtcagtgagcgaggaagcggaagagcgcccaatacgcaaaccgcctctccccgcgcgttggccgattcattaatgcagctggcacgacaggtttcccgactggaaagcgggcagtgagcgcaacgcaattaatgtgagttagctcactcattaggcaccccaggctttacactttatgcttccggctcgtatgttgtgtggaattgtgagcggataacaatttcacacaggaaacagcatatgcaaacaagcattactctgacatccaacgcatccggtacgtttgacggttactattacgaactctggaaggatactggcaatacaacaatgacggtctacactcaaggtcgcttttcctgccagtggtcgaacatcaataacgcgttgtttaggaccgggaagaaatacaaccagaattggcagtctcttggcacaatccggatcacgtactctgcgacttacaacccaaacgggaactcctacttgtgtatctatggctggtctaccaacccattggtcgagttctacatcgttgagtcctgggggaactggagaccgcctggtgcctgcctcacaggggacactaaggttatcgctaatgggcagctgttcgagctgggggagctggtggagaagctctcgggcgggcggttcggcccaacgccagtgaagggcctcaaggtcctggggatcgacgaggatggcaagctccgcgagttcgaggttcagtatgtgtacaaggaccgcaccgataggctgatcaagattaagacgcagctgggccgggagctcaaggtgacaccataccaccctctcctggtcaaccgcgagaatggcgagatcaagtggattaaggccgaggagctgaagccaggggacaagctcgcgatcccgtcgttcctccccctgattaccggcgagaaccctctggctgagtggctggggtacttcatgggctctgggtacgcttacccatcgaactctgtgatcaccttcacgaatgaggaccctctcatccgccagaggttcatggagctgaccgagaagctcttcccggacgcgaagatccgggagcgcattcatgctgatggcacgcccgaggtctacgtggtctccaggaaggcttggagcctcgttaactcaatctccctcaccctgattccacgggagggctggaaggggatccggtcgttcctgcgcgcctactctgactgcaatggccggatcgagtcagatgctattgtgctctccacggacaacaatgatatggcccagcagatcgcctacgcgctggcttcgttcgggatcattgcgaagatggacggcgaggatgtcatcattagcgggtcggacaacatcgagaggttcctcaatgagattggcttctctacacagtcaaagctgaaggaggcccagaagctcatcaggaagactaacgtgcggtctgacggcctgaagatcaattacgagctcatttcatacgttaaggacaggctccggctgaacgtgaatgataagcgcaacctgagctacaggaatgcgaaggagctgtcgtgggagctcatgaaggagatctactaccggctggaggagctggagcgcctcaagaaggtcctgtccgagccgatcctcattgactggaacgaggtcgccaagaagagcgatgaggttatcgagaaggccaagattcgcgcggagaagctcctggagtacatcaagggcgagaggaagccctccttcaaggagtacatcgagattgccaaggttctggggatcaacgtggagaggacaatcgaggctatgaagattttcgccaagaggtactccagctacgcggagatcggccggaagctggggacttggaacttcaatgtgaagacaatcctggagtccgacactgtcgataacgttgagatcctggagaagatccgcaagattgagctggagctgatcgaggagattctgagcgacgggaagctcaaggagggcatcgcgtacctgattttcctcttccagaacgagctctactgggatgagatcaccgaggtcaaggagctgaggggcgacttcatcatctacgatctgcacgttccaggctaccacaacttcattgcgggcaacatgccaacagtcgttcataacacgtccctgggccaagtgacaatcgatggcgggacctacgacatctataggacgacacgcgtcaaccagccttccattgtggggacagccacgttcgatcagtactggagcgtgcgcacctctaagcggacttcaggaacagtgaccgtgaccgatcacttccgcgcctgggcgaaccggggcctgaacctcggcacaatagaccaaattacattgtgcgtggagggttaccaaagctctggatcagccaacatcacccagaacaccttctctcagggctcttcttccggcagttcgggtggctcatccggctccacaacgactactcgcatcgagtgtgagaacatgtccttgtccggaccctacgttagcaggatcaccaatccctttaatggtattgcgctgtacgccaacggagacacagcccgcgctaccgttaacttccccgcaagtcgcaactacaatttccgcctgcggggttgcggcaacaacaataatcttgcccgtgtggacctgaggatcgacggacggaccgtcgggaccttttattaccagggcacatacccctgggaggccccaattgacaatgtttatgtcagtgcggggagtcatacagtcgaaatcactgttactgcggataacggcacatgggacgtgtatgccgactacctggtgatacagtgactcgagggggggcccggtacccaattcgccctatagtgagtcgtattacaattcactggccgtcgttttacaacgtcgtgactgggaaaaccctggcgttacccaacttaatcgccttgcagcacatccccctttcgccagctggcgtaatagcgaagaggcccgcaccgatcgcccttcccaacagttgcgcagcctgaatggcgaatggaaattgtaagcgttaatattttgttaaaattcgcgttaaatttttgttaaatcagctcattttttaaccaataggccgaaatcggcaaaatcccttataaatcaaaagaatagaccgagatagggttgagtgttgttccagtttggaacaagagtccactattaaagaacgtggactccaacgtcaaagggcgaaaaaccgtctatcagggcgatggcccactacgtgaaccatcaccctaatcaagttttttggggtcgaggtgccgtaaagcactaaatcggaaccctaaagggagcccccgatttagagcttgacggggaaagccggcgaacgtggcgagaaaggaagggaagaaagcgaaaggagcgggcgctagggcgctggcaagtgtagcggtcacgctgcgcgtaaccaccacacccgccgcgcttaatgcgccgctacagggcgcgtcaggtg

SEQ ID NO: 3258 - DNA, 4949 bp, Artificial Sequence
  Synthetic Construct, AT-101 intein modified protein encoding nucleic acids in pBluescript
gcacttttcggggaaatgtgcgcggaacccctatttgtttatttttctaaatacattcaaatatgtatccgctcatgagacaataaccctgataaatgcttcaataatattgaaaaaggaagagtatgagtattcaacatttccgtgtcgcccttattcccttttttgcggcattttgccttcctgtttttgctcacccagaaacgctggtgaaagtaaaagatgctgaagatcagttgggtgcacgagtgggttacatcgaactggatctcaacagcggtaagatccttgagagttttcgccccgaagaacgttttccaatgatgagcacttttaaagttctgctatgtggcgcggtattatcccgtattgacgccgggcaagagcaactcggtcgccgcatacactattctcagaatgacttggttgagtactcaccagtcacagaaaagcatcttacggatggcatgacagtaagagaattatgcagtgctgccataaccatgagtgataacactgcggccaacttacttctgacaacgatcggaggaccgaaggagctaaccgcttttttgcacaacatgggggatcatgtaactcgccttgatcgttgggaaccggagctgaatgaagccataccaaacgacgagcgtgacaccacgatgcctgtagcaatggcaacaacgttgcgcaaactattaactggcgaactacttactctagcttcccggcaacaattaatagactggatggaggcggataaagttgcaggaccacttctgcgctcggcccttccggctggctggtttattgctgataaatctggagccggtgagcgtgggtctcgcggtatcattgcagcactggggccagatggtaagccctcccgtatcgtagttatctacacgacggggagtcaggcaactatggatgaacgaaatagacagatcgctgagataggtgcctcactgattaagcattggtaactgtcagaccaagtttactcatatatactttagattgatttaaaacttcatttttaatttaaaaggatctaggtgaagatcctttttgataatctcatgaccaaaatcccttaacgtgagttttcgttccactgagcgtcagaccccgtagaaaagatcaaaggatcttcttgagatcctttttttctgcgcgtaatctgctgcttgcaaacaaaaaaaccaccgctaccagcggtggtttgtttgccggatcaagagctaccaactctttttccgaaggtaactggcttcagcagagcgcagataccaaatactgtccttctagtgtagccgtagttaggccaccacttcaagaactctgtagcaccgcctacatacctcgctctgctaatcctgttaccagtggctgctgccagtggcgataagtcgtgtcttaccgggttggactcaagacgatagttaccggataaggcgcagcggtcgggctgaacggggggttcgtgcacacagcccagcttggagcgaacgacctacaccgaactgagatacctacagcgtgagctatgagaaagcgccacgcttcccgaagggagaaaggcggacaggtatccggtaagcggcagggtcggaacaggagagcgcacgagggagcttccagggggaaacgcctggtatctttatagtcctgtcgggtttcgccacctctgacttgagcgtcgatttttgtgatgctcgtcaggggggcggagcctatggaaaaacgccagcaacgcggcctttttacggttcctggccttttgctggccttttgctcacatgttctttcctgcgttatcccctgattctgtggataaccgtattaccgcctttgagtgagctgataccgctcgccgcagccgaacgaccgagcgcagcgagtcagtgagcgaggaagcggaagagcgcccaatacgcaaaccgcctctccccgcgcgttggccgattcattaatgcagctggcacgacaggtttcccgactggaaagcgggcagtgagcgcaacgcaattaatgtgagttagctcactcattaggcaccccaggctttacactttatgcttccggctcgtatgttgtgtggaattgtgagcggataacaatttcacacaggaaacagcatatgcaaacaagcattactctgacatccaacgcatccggtacgtttgacggttactattacgaactctggaaggatactggcaatacaacaatgacggtctacactcaaggtcgcttttcctgccagtggtcgaacatcaataacgcgttgtttaggaccgggaagaaatacaaccagaattggcagtctcttggcacaatccggatcacgtactctgcgacttacaacccaaacgggaactcctacttgtgtatctatggctggtctaccaacccattggtcgagttctacatcgttgagtcctgggggaactggagaccgcctggtgcctgcctgcatcctgacactctcattctcacatcacagggggttcgcaagatcaaggagctctcgcgggagggggaggttttcgctctcgacttcaacctgaagctctccaaggcgaagtacaggctcctggagcgggacgctgatgagcagatgtacaaggtgaccctcctggacggcacggagctgtacctcacagccgatcacccagtgctcgtctacagggagggcaatctggctttcgttcctgccgacaagctccgggagacggatcatgtggtcctggtgctcaacaagtctgctcgggacaattacggcttcctcgatctcctgctggagattactgactcacaggaggattacgccatcctggagaacggcgagaccctgtcgctccactctctgaagatgctcgtggagcgcggggagatcaaggacattgcggttgtgggcttctcgcataacaatttcgggaaggtcatgctcagggatgagctgtggtacctcatcggctacctggctgggaagggcggggagatcaagggcaacggggtcgttatttccagcaggacgaaggagatcgtcggcctgacaaagagcctcaacatcgacctgattgagaccgaggaggggatcgtgctctcaaataagtccttcgtccggctgctccacctgatccattacacgccgcgcgtccccgaggtttacggcatcattaacaatacagagtggctcaaggccttcctggcgggctactacgacgccactctgctggaggggctgaccctggaggctctctacaagatcaaggtctacctgcagctgctcggcatccgcgcgaagattgaggacaacaagctcaaggttcacctggaggatctccagcggttccgcgagctgctcggcaagttcagccgccgcaagctctacgtggagacttcgcaggttccggtgttcaccgacttcgatgagcgctcctacgacttcccaaggatcctgggcggggatatctacatcattggcatcaagagcattgagaagttccattacaaggggaaggtctacgatctcgtcgtggagaactaccacaacttcattgctaatggcattgctgtgcataatacgtccctgggccaagtgacaatcgatggcgggacctacgacatctataggacgacacgcgtcaaccagccttccattgtggggacagccacgttcgatcagtactggagcgtgcgcacctctaagcggacttcaggaacagtgaccgtgaccgatcacttccgcgcctgggcgaaccggggcctgaacctcggcacaatagaccaaattacattgtgcgtggagggttaccaaagctctggatcagccaacatcacccagaacaccttctctcagggctcttcttccggcagttcgggtggctcatccggctccacaacgactactcgcatcgagtgtgagaacatgtccttgtccggaccctacgttagcaggatcaccaatccctttaatggtattgcgctgtacgccaacggagacacagcccgcgctaccgttaacttccccgcaagtcgcaactacaatttccgcctgcggggttgcggcaacaacaataatcttgcccgtgtggacctgaggatcgacggacggaccgtcgggaccttttattaccagggcacatacccctgggaggccccaattgacaatgtttatgtcagtgcggggagtcatacagtcgaaatcactgttactgcggataacggcacatgggacgtgtatgccgactacctggtgatacagtgactcgagggggggcccggtacccaattcgccctatagtgagtcgtattacaattcactggccgtcgttttacaacgtcgtgactgggaaaaccctggcgttacccaacttaatcgccttgcagcacatccccctttcgccagctggcgtaatagcgaagaggcccgcaccgatcgcccttcccaacagttgcgcagcctgaatggcgaatggaaattgtaagcgttaatattttgttaaaattcgcgttaaatttttgttaaatcagctcattttttaaccaataggccgaaatcggcaaaatcccttataaatcaaaagaatagaccgagatagggttgagtgttgttccagtttggaacaagagtccactattaaagaacgtggactccaacgtcaaagggcgaaaaaccgtctatcagggcgatggcccactacgtgaaccatcaccctaatcaagttttttggggtcgaggtgccgtaaagcactaaatcggaaccctaaagggagcccccgatttagagcttgacggggaaagccggcgaacgtggcgagaaaggaagggaagaaagcgaaaggagcgggcgctagggcgctggcaagtgtagcggtcacgctgcgcgtaaccaccacacccgccgcgcttaatgcgccgctacagggcgcgtcaggtg

SEQ ID NO: 3259 - DNA, 4610 bp, Artificial Sequence
  Synthetic Construct, AT-102 intein modified protein encoding nucleic acids in pBluescript
gcacttttcggggaaatgtgcgcggaacccctatttgtttatttttctaaatacattcaaatatgtatccgctcatgagacaataaccctgataaatgcttcaataatattgaaaaaggaagagtatgagtattcaacatttccgtgtcgcccttattcccttttttgcggcattttgccttcctgtttttgctcacccagaaacgctggtgaaagtaaaagatgctgaagatcagttgggtgcacgagtgggttacatcgaactggatctcaacagcggtaagatccttgagagttttcgccccgaagaacgttttccaatgatgagcacttttaaagttctgctatgtggcgcggtattatcccgtattgacgccgggcaagagcaactcggtcgccgcatacactattctcagaatgacttggttgagtactcaccagtcacagaaaagcatcttacggatggcatgacagtaagagaattatgcagtgctgccataaccatgagtgataacactgcggccaacttacttctgacaacgatcggaggaccgaaggagctaaccgcttttttgcacaacatgggggatcatgtaactcgccttgatcgttgggaaccggagctgaatgaagccataccaaacgacgagcgtgacaccacgatgcctgtagcaatggcaacaacgttgcgcaaactattaactggcgaactacttactctagcttcccggcaacaattaatagactggatggaggcggataaagttgcaggaccacttctgcgctcggcccttccggctggctggtttattgctgataaatctggagccggtgagcgtgggtctcgcggtatcattgcagcactggggccagatggtaagccctcccgtatcgtagttatctacacgacggggagtcaggcaactatggatgaacgaaatagacagatcgctgagataggtgcctcactgattaagcattggtaactgtcagaccaagtttactcatatatactttagattgatttaaaacttcatttttaatttaaaaggatctaggtgaagatcctttttgataatctcatgaccaaaatcccttaacgtgagttttcgttccactgagcgtcagaccccgtagaaaagatcaaaggatcttcttgagatcctttttttctgcgcgtaatctgctgcttgcaaacaaaaaaaccaccgctaccagcggtggtttgtttgccggatcaagagctaccaactctttttccgaaggtaactggcttcagcagagcgcagataccaaatactgtccttctagtgtagccgtagttaggccaccacttcaagaactctgtagcaccgcctacatacctcgctctgctaatcctgttaccagtggctgctgccagtggcgataagtcgtgtcttaccgggttggactcaagacgatagttaccggataaggcgcagcggtcgggctgaacggggggttcgtgcacacagcccagcttggagcgaacgacctacaccgaactgagatacctacagcgtgagctatgagaaagcgccacgcttcccgaagggagaaaggcggacaggtatccggtaagcggcagggtcggaacaggagagcgcacgagggagcttccagggggaaacgcctggtatctttatagtcctgtcgggtttcgccacctctgacttgagcgtcgatttttgtgatgctcgtcaggggggcggagcctatggaaaaacgccagcaacgcggcctttttacggttcctggccttttgctggccttttgctcacatgttctttcctgcgttatcccctgattctgtggataaccgtattaccgcctttgagtgagctgataccgctcgccgcagccgaacgaccgagcgcagcgagtcagtgagcgaggaagcggaagagcgcccaatacgcaaaccgcctctccccgcgcgttggccgattcattaatgcagctggcacgacaggtttcccgactggaaagcgggcagtgagcgcaacgcaattaatgtgagttagctcactcattaggcaccccaggctttacactttatgcttccggctcgtatgttgtgtggaattgtgagcggataacaatttcacacaggaaacagcatatgcaaacaagcattactctgacatccaacgcatccggtacgtttgacggttactattacgaactctggaaggatactggcaatacaacaatgacggtctacactcaaggtcgcttttcctgccagtggtcgaacatcaataacgcgttgtttaggaccgggaagaaatacaaccagaattggcagtctcttggcacaatccggatcacgtactctgcgacttacaacccaaacgggaactcctacttgtgtatctatggctggtctaccaacccattggtcgagttctacatcgttgagtcctgggggaactggagaccgcctggtgcctgcgtcgcgcctgatactctcattaacacagacaacgggcgggtggagatcggcaagttcgtggaggagtggatgaaggaggtcggggagatttcggaggagggcatctcttacgccccgtgcttccgcaaggtcgagaccttcaaggacgggaagattgttgagagcccaatccgcagggtgtggaagctccgggctcctaagaagctggtgcgcattaagacagagaacggccgcagcatcgccctcacaagggagactaagctcctgactatcaatgatggcgagctgtcgtgggtcgaggctggggaggtgaaggtcggcacctacgttgggacggtgaagtcagagaaggacgtgattccaggcgctgggaagaccatcagggatgtctccaagctctacaacatggagatggaggtcaaggactacctgacgagggaggaggttcggaaggcgattgagaagctggaggagatcatgaacccgatgaatatcaagattcccggcgtgcaggagtcctacgaggagctcctgcggaagctggagaccacgaacgatgagcgggttcgcaatgagacactcatcctcctgtccgacgtgagcgatgcccacgagctggcgaaggagaagatcgagaagattaaggagatcgtgaactccgaggtccattgggagaaggtcaccgaggttggcgaggtggacggggtcgagtatgtgtacgatctcacagtggagggctctcataatttcgttgctaatggcttcatcgttcataatacgtccctgggccaagtgacaatcgatggcgggacctacgacatctataggacgacacgcgtcaaccagccttccattgtggggacagccacgttcgatcagtactggagcgtgcgcacctctaagcggacttcaggaacagtgaccgtgaccgatcacttccgcgcctgggcgaaccggggcctgaacctcggcacaatagaccaaattacattgtgcgtggagggttaccaaagctctggatcagccaacatcacccagaacaccttctctcagggctcttcttccggcagttcgggtggctcatccggctccacaacgactactcgcatcgagtgtgagaacatgtccttgtccggaccctacgttagcaggatcaccaatccctttaatggtattgcgctgtacgccaacggagacacagcccgcgctaccgttaacttccccgcaagtcgcaactacaatttccgcctgcggggttgcggcaacaacaataatcttgcccgtgtggacctgaggatcgacggacggaccgtcgggaccttttattaccagggcacatacccctgggaggccccaattgacaatgtttatgtcagtgcggggagtcatacagtcgaaatcactgttactgcggataacggcacatgggacgtgtatgccgactacctggtgatacagtgactcgagggggggcccggtacccaattcgccctatagtgagtcgtattacaattcactggccgtcgttttacaacgtcgtgactgggaaaaccctggcgttacccaacttaatcgccttgcagcacatccccctttcgccagctggcgtaatagcgaagaggcccgcaccgatcgcccttcccaacagttgcgcagcctgaatggcgaatggaaattgtaagcgttaatattttgttaaaattcgcgttaaatttttgttaaatcagctcattttttaaccaataggccgaaatcggcaaaatcccttataaatcaaaagaatagaccgagatagggttgagtgttgttccagtttggaacaagagtccactattaaagaacgtggactccaacgtcaaagggcgaaaaaccgtctatcagggcgatggcccactacgtgaaccatcaccctaatcaagttttttggggtcgaggtgccgtaaagcactaaatcggaaccctaaagggagcccccgatttagagcttgacggggaaagccggcgaacgtggcgagaaaggaagggaagaaagcgaaaggagcgggcgctagggcgctggcaagtgtagcggtcacgctgcgcgtaaccaccacacccgccgcgcttaatgcgccgctacagggcgcgtcaggtg

SEQ ID NO: 3260 - DNA, 5162 bp, Artificial Sequence
  Synthetic Construct, AT-103 intein modified protein encoding nucleic acids in pBluescript
gcacttttcggggaaatgtgcgcggaacccctatttgtttatttttctaaatacattcaaatatgtatccgctcatgagacaataaccctgataaatgcttcaataatattgaaaaaggaagagtatgagtattcaacatttccgtgtcgcccttattcccttttttgcggcattttgccttcctgtttttgctcacccagaaacgctggtgaaagtaaaagatgctgaagatcagttgggtgcacgagtgggttacatcgaactggatctcaacagcggtaagatccttgagagttttcgccccgaagaacgttttccaatgatgagcacttttaaagttctgctatgtggcgcggtattatcccgtattgacgccgggcaagagcaactcggtcgccgcatacactattctcagaatgacttggttgagtactcaccagtcacagaaaagcatcttacggatggcatgacagtaagagaattatgcagtgctgccataaccatgagtgataacactgcggccaacttacttctgacaacgatcggaggaccgaaggagctaaccgcttttttgcacaacatgggggatcatgtaactcgccttgatcgttgggaaccggagctgaatgaagccataccaaacgacgagcgtgacaccacgatgcctgtagcaatggcaacaacgttgcgcaaactattaactggcgaactacttactctagcttcccggcaacaattaatagactggatggaggcggataaagttgcaggaccacttctgcgctcggcccttccggctggctggtttattgctgataaatctggagccggtgagcgtgggtctcgcggtatcattgcagcactggggccagatggtaagccctcccgtatcgtagttatctacacgacggggagtcaggcaactatggatgaacgaaatagacagatcgctgagataggtgcctcactgattaagcattggtaactgtcagaccaagtttactcatatatactttagattgatttaaaacttcatttttaatttaaaaggatctaggtgaagatcctttttgataatctcatgaccaaaatcccttaacgtgagttttcgttccactgagcgtcagaccccgtagaaaagatcaaaggatcttcttgagatcctttttttctgcgcgtaatctgctgcttgcaaacaaaaaaaccaccgctaccagcggtggtttgtttgccggatcaagagctaccaactctttttccgaaggtaactggcttcagcagagcgcagataccaaatactgtccttctagtgtagccgtagttaggccaccacttcaagaactctgtagcaccgcctacatacctcgctctgctaatcctgttaccagtggctgctgccagtggcgataagtcgtgtcttaccgggttggactcaagacgatagttaccggataaggcgcagcggtcgggctgaacggggggttcgtgcacacagcccagcttggagcgaacgacctacaccgaactgagatacctacagcgtgagctatgagaaagcgccacgcttcccgaagggagaaaggcggacaggtatccggtaagcggcagggtcggaacaggagagcgcacgagggagcttccagggggaaacgcctggtatctttatagtcctgtcgggtttcgccacctctgacttgagcgtcgatttttgtgatgctcgtcaggggggcggagcctatggaaaaacgccagcaacgcggcctttttacggttcctggccttttgctggccttttgctcacatgttctttcctgcgttatcccctgattctgtggataaccgtattaccgcctttgagtgagctgataccgctcgccgcagccgaacgaccgagcgcagcgagtcagtgagcgaggaagcggaagagcgcccaatacgcaaaccgcctctccccgcgcgttggccgattcattaatgcagctggcacgacaggtttcccgactggaaagcgggcagtgagcgcaacgcaattaatgtgagttagctcactcattaggcaccccaggctttacactttatgcttccggctcgtatgttgtgtggaattgtgagcggataacaatttcacacaggaaacagcatatgcaaacaagcattactctgacatccaacgcatccggtacgtttgacggttactattacgaactctggaaggatactggcaatacaacaatgacggtctacactcaaggtcgcttttcctgccagtggtcgaacatcaataacgcgttgtttaggaccgggaagaaatacaaccagaattggcagtctcttggcacaatccggatcacgtactctgcgacttacaacccaaacgggaactcctacttgtgtatctatggctggtctaccaacccattggtcgagttctacatcgttgagtcctgggggaactggagaccgcctggtgcctgcctgctgccggaggagcgggttattctgcctgactacgggcctattactctggaggagctcttcaatatgacaaaggagacagtgttcaaggacgaggagaaggaggtccggaagctcggcatccgcatgccagtggctggcgtcgatgggcgggtgcgcctgctggagggcccctacgtttggaaggtgcgctacaaggggaagatgctcagggtcaagctgaaggactggcacagcgtggctgtcacaccagagcatcccttcctcaccacgcggggctgggtgcgcgctgaccagctgaagcccggggattacgttgccgtgccaaagatcctccctgggaaggacgataaggagaagttcctccagtatgtgcacgagaagctgaagggcaaggttcatattaagctgccgtccagcgacgaggagtgggagacattcttctacttcgccggcactatcttcgggcgcgagaactcggtgaatccagagggcctcacccacgaggtcaaggctctcctggagctcttcaaggttctgttcgagtacccgagggaggtcctccgggttctgttcatggccccggtgcgctacgtggcgaacttcctccgcggcttcttcgacattaacggctacgtcaatggggaggagctgagggtcgaggttaggggggctccacatgaggttctggaggagctctccctgatcctcctgaggctgggcatcgtgtccaagatctaccctacgagcctggctatttcgggcaggaggaacctggagctgttccggcgctacatcgggttctcggagaagcagaaggccaaggagctggagggcatcattaggcggtctgagaactcagagtcctacccaattttcgaggagctgcgcaggatcaggctcctgttcggcttcacccgggcggagctctcgtctacgatcccactgtactctaagtacgagtcaaaggaggctccttcatacgagatcctcatgaagattctgaatacaatcgagaaggggtctaaggacctcaacaagaagatcactattctggagggcagggtgcgggatcacgagtacattgaggagttcaagcgcgagggcctgatcaaggacgggaagctcaccgagctgggcaaggagctcctggaggtctggcgcaacagggagttcgactccagggatgtcaactacctccggaatatcattgagaacttcgttttcctgccggtggagaagatcgaggagttcgagtacgatggctacgtctacgacgttactacagagactcataatttcattgctaatggcatcctcgttcataatacgtccctgggccaagtgacaatcgatggcgggacctacgacatctataggacgacacgcgtcaaccagccttccattgtggggacagccacgttcgatcagtactggagcgtgcgcacctctaagcggacttcaggaacagtgaccgtgaccgatcacttccgcgcctgggcgaaccggggcctgaacctcggcacaatagaccaaattacattgtgcgtggagggttaccaaagctctggatcagccaacatcacccagaacaccttctctcagggctcttcttccggcagttcgggtggctcatccggctccacaacgactactcgcatcgagtgtgagaacatgtccttgtccggaccctacgttagcaggatcaccaatccctttaatggtattgcgctgtacgccaacggagacacagcccgcgctaccgttaacttccccgcaagtcgcaactacaatttccgcctgcggggttgcggcaacaacaataatcttgcccgtgtggacctgaggatcgacggacggaccgtcgggaccttttattaccagggcacatacccctgggaggccccaattgacaatgtttatgtcagtgcggggagtcatacagtcgaaatcactgttactgcggataacggcacatgggacgtgtatgccgactacctggtgatacagtgactcgagggggggcccggtacccaattcgccctatagtgagtcgtattacaattcactggccgtcgttttacaacgtcgtgactgggaaaaccctggcgttacccaacttaatcgccttgcagcacatccccctttcgccagctggcgtaatagcgaagaggcccgcaccgatcgcccttcccaacagttgcgcagcctgaatggcgaatggaaattgtaagcgttaatattttgttaaaattcgcgttaaatttttgttaaatcagctcattttttaaccaataggccgaaatcggcaaaatcccttataaatcaaaagaatagaccgagatagggttgagtgttgttccagtttggaacaagagtccactattaaagaacgtggactccaacgtcaaagggcgaaaaaccgtctatcagggcgatggcccactacgtgaaccatcaccctaatcaagttttttggggtcgaggtgccgtaaagcactaaatcggaaccctaaagggagcccccgatttagagcttgacggggaaagccggcgaacgtggcgagaaaggaagggaagaaagcgaaaggagcgggcgctagggcgctggcaagtgtagcggtcacgctgcgcgtaaccaccacacccgccgcgcttaatgcgccgctacagggcgcgtcaggtg

SEQ ID NO: 3261 - DNA, 5255 bp, Artificial Sequence
  Synthetic Construct, AT-104 intein modified protein encoding nucleic acids in pBluescript
gcacttttcggggaaatgtgcgcggaacccctatttgtttatttttctaaatacattcaaatatgtatccgctcatgagacaataaccctgataaatgcttcaataatattgaaaaaggaagagtatgagtattcaacatttccgtgtcgcccttattcccttttttgcggcattttgccttcctgtttttgctcacccagaaacgctggtgaaagtaaaagatgctgaagatcagttgggtgcacgagtgggttacatcgaactggatctcaacagcggtaagatccttgagagttttcgccccgaagaacgttttccaatgatgagcacttttaaagttctgctatgtggcgcggtattatcccgtattgacgccgggcaagagcaactcggtcgccgcatacactattctcagaatgacttggttgagtactcaccagtcacagaaaagcatcttacggatggcatgacagtaagagaattatgcagtgctgccataaccatgagtgataacactgcggccaacttacttctgacaacgatcggaggaccgaaggagctaaccgcttttttgcacaacatgggggatcatgtaactcgccttgatcgttgggaaccggagctgaatgaagccataccaaacgacgagcgtgacaccacgatgcctgtagcaatggcaacaacgttgcgcaaactattaactggcgaactacttactctagcttcccggcaacaattaatagactggatggaggcggataaagttgcaggaccacttctgcgctcggcccttccggctggctggtttattgctgataaatctggagccggtgagcgtgggtctcgcggtatcattgcagcactggggccagatggtaagccctcccgtatcgtagttatctacacgacggggagtcaggcaactatggatgaacgaaatagacagatcgctgagataggtgcctcactgattaagcattggtaactgtcagaccaagtttactcatatatactttagattgatttaaaacttcatttttaatttaaaaggatctaggtgaagatcctttttgataatctcatgaccaaaatcccttaacgtgagttttcgttccactgagcgtcagaccccgtagaaaagatcaaaggatcttcttgagatcctttttttctgcgcgtaatctgctgcttgcaaacaaaaaaaccaccgctaccagcggtggtttgtttgccggatcaagagctaccaactctttttccgaaggtaactggcttcagcagagcgcagataccaaatactgtccttctagtgtagccgtagttaggccaccacttcaagaactctgtagcaccgcctacatacctcgctctgctaatcctgttaccagtggctgctgccagtggcgataagtcgtgtcttaccgggttggactcaagacgatagttaccggataaggcgcagcggtcgggctgaacggggggttcgtgcacacagcccagcttggagcgaacgacctacaccgaactgagatacctacagcgtgagctatgagaaagcgccacgcttcccgaagggagaaaggcggacaggtatccggtaagcggcagggtcggaacaggagagcgcacgagggagcttccagggggaaacgcctggtatctttatagtcctgtcgggtttcgccacctctgacttgagcgtcgatttttgtgatgctcgtcaggggggcggagcctatggaaaaacgccagcaacgcggcctttttacggttcctggccttttgctggccttttgctcacatgttctttcctgcgttatcccctgattctgtggataaccgtattaccgcctttgagtgagctgataccgctcgccgcagccgaacgaccgagcgcagcgagtcagtgagcgaggaagcggaagagcgcccaatacgcaaaccgcctctccccgcgcgttggccgattcattaatgcagctggcacgacaggtttcccgactggaaagcgggcagtgagcgcaacgcaattaatgtgagttagctcactcattaggcaccccaggctttacactttatgcttccggctcgtatgttgtgtggaattgtgagcggataacaatttcacacaggaaacagcatatgcaaacaagcattactctgacatccaacgcatccggtacgtttgacggttactattacgaactctggaaggatactggcaatacaacaatgacggtctacactcaaggtcgcttttcctgccagtggtcgaacatcaataacgcgttgtttaggaccgggaagaaatacaaccagaattggcagtctcttggcacaatccggatcacgtactctgcgacttacaacccaaacgggaactcctacttgtgtatctatggctggtctaccaacccattggtcgagttctacatcgttgagtcctgggggaactggagaccgcctggtgcctgcgtttcgggggactctaaggtcctgacggagaaggggccagtggagattcggcatctcaattcgggcatgatcgtgggcatcaatggcttcaagagcaggttcgtcaagttccaggagctgcaccaggtcaagtaccaggagtacggggttaagatccggacccagctcggcttcgaggtgaagtgcaccagggagcatcggttcctcacgattgacaagaacggcgagctgcgctgggttgaggcttggaggctcaaggagggcgattacgtggggatcattcgcaagctgccgtctcccaactcaaaggttctcatcctggacttcctcccggagtcgacgtacctctggctgaataaggagttcctcaagaagctgaaggtctctatcaaggagaagttcgggtcaattaagaactacgccaaggagcggggcttcaattccagctacctggtgaagcagctcaacgggctgtccccattccgctggggcaggctcagggttatcctgaatgatgtgtcgatcgagatttctcgggacgatatcgagcgcattacatcacgcaggggcaagtactccctcccaccagagctgactcctggcatcgctaggctcctggggttctggatggctagcggctcgctcaaccgcaataccctgatcttctactcgcaggacaagaagattctggagcgctacgaggatctgtgcaagcgcgagttcagggtcaaggggcggatcaaggcccaggacaagggcacgtacatcctggagattccctcgtctctcctgtctttcgtcttcaagaacctcgcgcgcccaaagctggaggttccaccgatcatctacatcctgcctgagaagcacaaggaggagttcctcgctggctacttcgacggcaacgggttcatcaagattgagaatgggaggatccattccctcggcttcttcgccttcaaccgcaagttcgcggaggggatcagggatattctcctgcagctcggcatcctgtcatccattaatgagcagacattcgaggtgagcatcattgagggcgagaagttcctgaagatcgtcaactcctggcgcagcaattactacaaggagtgggaggacgtgatcccgaacctggagaagaggctgaaggagattgaggagaagctcggctaccccgggacttacaatcggcgcgagatcaggcggtccgagctcaaggcgatcattaagctgtacgagaaggtggctcgggagaggggcctgaacgacgtcctcaaggagctgagctacctcaaggagctgtcggagggcgacatcttcttcgataggatcaccagcattgagccagtgtacctcgatgtcgcgtacggcatcatcaactcagagacaggcaactacgtggttaatggcttcgtttcaaagaacacgtccctgggccaagtgacaatcgatggcgggacctacgacatctataggacgacacgcgtcaaccagccttccattgtggggacagccacgttcgatcagtactggagcgtgcgcacctctaagcggacttcaggaacagtgaccgtgaccgatcacttccgcgcctgggcgaaccggggcctgaacctcggcacaatagaccaaattacattgtgcgtggagggttaccaaagctctggatcagccaacatcacccagaacaccttctctcagggctcttcttccggcagttcgggtggctcatccggctccacaacgactactcgcatcgagtgtgagaacatgtccttgtccggaccctacgttagcaggatcaccaatccctttaatggtattgcgctgtacgccaacggagacacagcccgcgctaccgttaacttccccgcaagtcgcaactacaatttccgcctgcggggttgcggcaacaacaataatcttgcccgtgtggacctgaggatcgacggacggaccgtcgggaccttttattaccagggcacatacccctgggaggccccaattgacaatgtttatgtcagtgcggggagtcatacagtcgaaatcactgttactgcggataacggcacatgggacgtgtatgccgactacctggtgatacagtgactcgagggggggcccggtacccaattcgccctatagtgagtcgtattacaattcactggccgtcgttttacaacgtcgtgactgggaaaaccctggcgttacccaacttaatcgccttgcagcacatccccctttcgccagctggcgtaatagcgaagaggcccgcaccgatcgcccttcccaacagttgcgcagcctgaatggcgaatggaaattgtaagcgttaatattttgttaaaattcgcgttaaatttttgttaaatcagctcattttttaaccaataggccgaaatcggcaaaatcccttataaatcaaaagaatagaccgagatagggttgagtgttgttccagtttggaacaagagtccactattaaagaacgtggactccaacgtcaaagggcgaaaaaccgtctatcagggcgatggcccactacgtgaaccatcaccctaatcaagttttttggggtcgaggtgccgtaaagcactaaatcggaaccctaaagggagcccccgatttagagcttgacggggaaagccggcgaacgtggcgagaaaggaagggaagaaagcgaaaggagcgggcgctagggcgctggcaagtgtagcggtcacgctgcgcgtaaccaccacacccgccgcgcttaatgcgccgctacagggcgcgtcaggtg

SEQ ID NO: 3262 - DNA, 5252 bp, Artificial Sequence
  Synthetic Construct, AT-105 intein modified protein encoding nucleic acids in pBluescript
gcacttttcggggaaatgtgcgcggaacccctatttgtttatttttctaaatacattcaaatatgtatccgctcatgagacaataaccctgataaatgcttcaataatattgaaaaaggaagagtatgagtattcaacatttccgtgtcgcccttattcccttttttgcggcattttgccttcctgtttttgctcacccagaaacgctggtgaaagtaaaagatgctgaagatcagttgggtgcacgagtgggttacatcgaactggatctcaacagcggtaagatccttgagagttttcgccccgaagaacgttttccaatgatgagcacttttaaagttctgctatgtggcgcggtattatcccgtattgacgccgggcaagagcaactcggtcgccgcatacactattctcagaatgacttggttgagtactcaccagtcacagaaaagcatcttacggatggcatgacagtaagagaattatgcagtgctgccataaccatgagtgataacactgcggccaacttacttctgacaacgatcggaggaccgaaggagctaaccgcttttttgcacaacatgggggatcatgtaactcgccttgatcgttgggaaccggagctgaatgaagccataccaaacgacgagcgtgacaccacgatgcctgtagcaatggcaacaacgttgcgcaaactattaactggcgaactacttactctagcttcccggcaacaattaatagactggatggaggcggataaagttgcaggaccacttctgcgctcggcccttccggctggctggtttattgctgataaatctggagccggtgagcgtgggtctcgcggtatcattgcagcactggggccagatggtaagccctcccgtatcgtagttatctacacgacggggagtcaggcaactatggatgaacgaaatagacagatcgctgagataggtgcctcactgattaagcattggtaactgtcagaccaagtttactcatatatactttagattgatttaaaacttcatttttaatttaaaaggatctaggtgaagatcctttttgataatctcatgaccaaaatcccttaacgtgagttttcgttccactgagcgtcagaccccgtagaaaagatcaaaggatcttcttgagatcctttttttctgcgcgtaatctgctgcttgcaaacaaaaaaaccaccgctaccagcggtggtttgtttgccggatcaagagctaccaactctttttccgaaggtaactggcttcagcagagcgcagataccaaatactgtccttctagtgtagccgtagttaggccaccacttcaagaactctgtagcaccgcctacatacctcgctctgctaatcctgttaccagtggctgctgccagtggcgataagtcgtgtcttaccgggttggactcaagacgatagttaccggataaggcgcagcggtcgggctgaacggggggttcgtgcacacagcccagcttggagcgaacgacctacaccgaactgagatacctacagcgtgagctatgagaaagcgccacgcttcccgaagggagaaaggcggacaggtatccggtaagcggcagggtcggaacaggagagcgcacgagggagcttccagggggaaacgcctggtatctttatagtcctgtcgggtttcgccacctctgacttgagcgtcgatttttgtgatgctcgtcaggggggcggagcctatggaaaaacgccagcaacgcggcctttttacggttcctggccttttgctggccttttgctcacatgttctttcctgcgttatcccctgattctgtggataaccgtattaccgcctttgagtgagctgataccgctcgccgcagccgaacgaccgagcgcagcgagtcagtgagcgaggaagcggaagagcgcccaatacgcaaaccgcctctccccgcgcgttggccgattcattaatgcagctggcacgacaggtttcccgactggaaagcgggcagtgagcgcaacgcaattaatgtgagttagctcactcattaggcaccccaggctttacactttatgcttccggctcgtatgttgtgtggaattgtgagcggataacaatttcacacaggaaacagcatatgcaaacaagcattactctgacatccaacgcatccggtacgtttgacggttactattacgaactctggaaggatactggcaatacaacaatgacggtctacactcaaggtcgcttttcctgccagtggtcgaacatcaataacgcgttgtttaggaccgggaagaaatacaaccagaattggcagtctcttggcacaatccggatcacgtactctgcgacttacaacccaaacgggaactcctacttgtgtatctatggctggtctaccaacccattggtcgagttctacatcgttgagtcctgggggaactggagaccgcctggtgcctgcttctcaggggaggaggttattatcgtggagaagggcaaggaccgcaaggtcgttaagctgcgggagttcgtggaggacgctctcaaggagccatccggcgaggggatggacggcgatatcaaggtgacatacaaggacctgcgcggcgaggatgtcaggattctcactaaggacgggttcgtgaagctcctctacgtgaacaagcgcgagggcaagcagaagctcaggaagatcgtcaatctggacaaggattactggctcgccgttacacctgaccacaaggtgttcacttctgagggcctgaaggaggcgggggagatcacggagaaggacgagatcattagggtcccactcgttatcctggatggccctaagattgcctcaacatacggcgaggacgggaagttcgacgattacatccgctggaagaagtactacgagaagactggcaacgggtacaagcgcgccgcgaaggagctgaatatcaaggagagcaccctcaggtggtggacgcagggcgctaagccaaactcgctgaagatgatcgaggagctggagaagctgaatctcctgcctctgacctctgaggactcacggctggagaaggtcgccatcattctcggcgcgctgttctcagacgggaacatcgatcgcaacttcaataccctctccttcatctccagcgagcggaaggccattgagcgcttcgtggagacgctcaaggagctgttcggcgagttcaactacgagatcagggataatcatgagtccctcggcaagagcattctgttccggacctgggaccgcaggatcattcgcttcttcgtcgcgctgggcgctccggttgggaacaagacgaaggtgaagctggagctgccgtggtggatcaagctgaagccctcgctcttcctggccttcatggacggcctctactcgggcgatgggtctgtcccaaggttcgctcgctacgaggagggcatcaagttcaacgggaccttcgagattgctcagctgacggacgatgtggagaagaagctccccttcttcgaggagatcgcttggtacctctccttcttcggcattaaggccaaggttagggtggacaagacaggggataagtacaaggttcggctgatcttctcacagtccattgacaacgtgctcaatttcctggagttcatcccgattagcctctcgcccgctaagagggagaagttcctgcgggaggtcgagtcctacctcgctgctgttccagagtcgtctctggctggcaggatcgaggagctcagggagcacttcaaccggatcaagaagggcgagcggcgcagcttcattgagacctgggaggtggtcaatgtgacctacaatgttactacggagacaggcaatctgctcgctaatgggctcttcgttaagaatacgtccctgggccaagtgacaatcgatggcgggacctacgacatctataggacgacacgcgtcaaccagccttccattgtggggacagccacgttcgatcagtactggagcgtgcgcacctctaagcggacttcaggaacagtgaccgtgaccgatcacttccgcgcctgggcgaaccggggcctgaacctcggcacaatagaccaaattacattgtgcgtggagggttaccaaagctctggatcagccaacatcacccagaacaccttctctcagggctcttcttccggcagttcgggtggctcatccggctccacaacgactactcgcatcgagtgtgagaacatgtccttgtccggaccctacgttagcaggatcaccaatccctttaatggtattgcgctgtacgccaacggagacacagcccgcgctaccgttaacttccccgcaagtcgcaactacaatttccgcctgcggggttgcggcaacaacaataatcttgcccgtgtggacctgaggatcgacggacggaccgtcgggaccttttattaccagggcacatacccctgggaggccccaattgacaatgtttatgtcagtgcggggagtcatacagtcgaaatcactgttactgcggataacggcacatgggacgtgtatgccgactacctggtgatacagtgactcgagggggggcccggtacccaattcgccctatagtgagtcgtattacaattcactggccgtcgttttacaacgtcgtgactgggaaaaccctggcgttacccaacttaatcgccttgcagcacatccccctttcgccagctggcgtaatagcgaagaggcccgcaccgatcgcccttcccaacagttgcgcagcctgaatggcgaatggaaattgtaagcgttaatattttgttaaaattcgcgttaaatttttgttaaatcagctcattttttaaccaataggccgaaatcggcaaaatcccttataaatcaaaagaatagaccgagatagggttgagtgttgttccagtttggaacaagagtccactattaaagaacgtggactccaacgtcaaagggcgaaaaaccgtctatcagggcgatggcccactacgtgaaccatcaccctaatcaagttttttggggtcgaggtgccgtaaagcactaaatcggaaccctaaagggagcccccgatttagagcttgacggggaaagccggcgaacgtggcgagaaaggaagggaagaaagcgaaaggagcgggcgctagggcgctggcaagtgtagcggtcacgctgcgcgtaaccaccacacccgccgcgcttaatgcgccgctacagggcgcgtcaggtg

SEQ ID NO: 3263 - DNA, 5210 bp, Artificial Sequence
  Synthetic Construct, AT-106 intein modified protein encoding nucleic acids in pBluescript
gcacttttcggggaaatgtgcgcggaacccctatttgtttatttttctaaatacattcaaatatgtatccgctcatgagacaataaccctgataaatgcttcaataatattgaaaaaggaagagtatgagtattcaacatttccgtgtcgcccttattcccttttttgcggcattttgccttcctgtttttgctcacccagaaacgctggtgaaagtaaaagatgctgaagatcagttgggtgcacgagtgggttacatcgaactggatctcaacagcggtaagatccttgagagttttcgccccgaagaacgttttccaatgatgagcacttttaaagttctgctatgtggcgcggtattatcccgtattgacgccgggcaagagcaactcggtcgccgcatacactattctcagaatgacttggttgagtactcaccagtcacagaaaagcatcttacggatggcatgacagtaagagaattatgcagtgctgccataaccatgagtgataacactgcggccaacttacttctgacaacgatcggaggaccgaaggagctaaccgcttttttgcacaacatgggggatcatgtaactcgccttgatcgttgggaaccggagctgaatgaagccataccaaacgacgagcgtgacaccacgatgcctgtagcaatggcaacaacgttgcgcaaactattaactggcgaactacttactctagcttcccggcaacaattaatagactggatggaggcggataaagttgcaggaccacttctgcgctcggcccttccggctggctggtttattgctgataaatctggagccggtgagcgtgggtctcgcggtatcattgcagcactggggccagatggtaagccctcccgtatcgtagttatctacacgacggggagtcaggcaactatggatgaacgaaatagacagatcgctgagataggtgcctcactgattaagcattggtaactgtcagaccaagtttactcatatatactttagattgatttaaaacttcatttttaatttaaaaggatctaggtgaagatcctttttgataatctcatgaccaaaatcccttaacgtgagttttcgttccactgagcgtcagaccccgtagaaaagatcaaaggatcttcttgagatcctttttttctgcgcgtaatctgctgcttgcaaacaaaaaaaccaccgctaccagcggtggtttgtttgccggatcaagagctaccaactctttttccgaaggtaactggcttcagcagagcgcagataccaaatactgtccttctagtgtagccgtagttaggccaccacttcaagaactctgtagcaccgcctacatacctcgctctgctaatcctgttaccagtggctgctgccagtggcgataagtcgtgtcttaccgggttggactcaagacgatagttaccggataaggcgcagcggtcgggctgaacggggggttcgtgcacacagcccagcttggagcgaacgacctacaccgaactgagatacctacagcgtgagctatgagaaagcgccacgcttcccgaagggagaaaggcggacaggtatccggtaagcggcagggtcggaacaggagagcgcacgagggagcttccagggggaaacgcctggtatctttatagtcctgtcgggtttcgccacctctgacttgagcgtcgatttttgtgatgctcgtcaggggggcggagcctatggaaaaacgccagcaacgcggcctttttacggttcctggccttttgctggccttttgctcacatgttctttcctgcgttatcccctgattctgtggataaccgtattaccgcctttgagtgagctgataccgctcgccgcagccgaacgaccgagcgcagcgagtcagtgagcgaggaagcggaagagcgcccaatacgcaaaccgcctctccccgcgcgttggccgattcattaatgcagctggcacgacaggtttcccgactggaaagcgggcagtgagcgcaacgcaattaatgtgagttagctcactcattaggcaccccaggctttacactttatgcttccggctcgtatgttgtgtggaattgtgagcggataacaatttcacacaggaaacagcatatgcaaacaagcattactctgacatccaacgcatccggtacgtttgacggttactattacgaactctggaaggatactggcaatacaacaatgacggtctacactcaaggtcgcttttcctgccagtggtcgaacatcaataacgcgttgtttaggaccgggaagaaatacaaccagaattggcagtctcttggcacaatccggatcacgtactctgcgacttacaacccaaacgggaactcctacttgtgtatctatggctggtctaccaacccattggtcgagttctacatcgttgagtcctgggggaactggagaccgcctggtgcctctatcctccctgatgagtggctgcctatcgtggagaatgagaaggttcggttcgttaagatcggggatttcattgatcgggagatcgaggagaacgccgagcgcgttaagagggacggcgagaccgagatcctggaggtgaaggatctcaaggccctgtccttcaatcgcgagacgaagaagagcgagctcaagaaggtcaaggcgctgatccgccacaggtactccggcaaggtgtacagcattaagctcaagtcggggcgcaggatcaagattacctcaggccattccctgttcagcgtcaagaacggcaagctcgttaaggtgcggggggacgagctcaagccaggcgatctggtggtcgttccaggccgcctcaagctgcctgagtcgaagcaggtgctcaacctggtcgagctcctgctcaagctgccagaggaggagacgtctaacatcgtcatgatgattcctgttaaggggcgcaagaatttcttcaagggcatgctcaagacactgtactggatcttcggcgagggggagaggccaaggactgctggcaggtacctcaagcacctggagaggctcggctacgtgaagctcaagaggaggggctgcgaggttctcgactgggagtccctgaagaggtaccggaagctgtacgagacactcatcaagaacctgaagtacaacggcaatagccgcgcttacatggtggagttcaattctctcagggacgtggtctcactgatgccgatcgaggagctcaaggagtggatcattggcgagccgagggggccaaagatcggcactttcattgatgtcgacgattcgttcgcgaagctgctcgggtactacatctccagcggcgacgtggagaaggatagggtcaagttccactccaaggaccagaacgtgctggaggatatcgccaagctcgcggagaagctgttcgggaaggtgaggaggggcagggggtacattgaggtcagcggcaagatctcgcatgctattttcagggtcctcgctgaggggaagcggatcccggagttcattttcaccagccccatggacatcaaggtggcgttcctgaagggcctcaacgggaatgctgaggagctgaccttctcgacgaagtctgagctgctcgtcaaccagctcatcctgctcctcaactccattggggtgtcagatatcaagattgagcatgagaagggcgtctacagggtttacatcaacaagaaggagtcgtctaatggcgacatcgttctggattcagtggagtccattgaggttgagaagtacgagggctacgtgtacgacctctctgtggaggataatgagaatttcctcgtgggcttcgggctgctctacgctcataatacgtccctgggccaagtgacaatcgatggcgggacctacgacatctataggacgacacgcgtcaaccagccttccattgtggggacagccacgttcgatcagtactggagcgtgcgcacctctaagcggacttcaggaacagtgaccgtgaccgatcacttccgcgcctgggcgaaccggggcctgaacctcggcacaatagaccaaattacattgtgcgtggagggttaccaaagctctggatcagccaacatcacccagaacaccttctctcagggctcttcttccggcagttcgggtggctcatccggctccacaacgactactcgcatcgagtgtgagaacatgtccttgtccggaccctacgttagcaggatcaccaatccctttaatggtattgcgctgtacgccaacggagacacagcccgcgctaccgttaacttccccgcaagtcgcaactacaatttccgcctgcggggttgcggcaacaacaataatcttgcccgtgtggacctgaggatcgacggacggaccgtcgggaccttttattaccagggcacatacccctgggaggccccaattgacaatgtttatgtcagtgcggggagtcatacagtcgaaatcactgttactgcggataacggcacatgggacgtgtatgccgactacctggtgatacagtgactcgagggggggcccggtacccaattcgccctatagtgagtcgtattacaattcactggccgtcgttttacaacgtcgtgactgggaaaaccctggcgttacccaacttaatcgccttgcagcacatccccctttcgccagctggcgtaatagcgaagaggcccgcaccgatcgcccttcccaacagttgcgcagcctgaatggcgaatggaaattgtaagcgttaatattttgttaaaattcgcgttaaatttttgttaaatcagctcattttttaaccaataggccgaaatcggcaaaatcccttataaatcaaaagaatagaccgagatagggttgagtgttgttccagtttggaacaagagtccactattaaagaacgtggactccaacgtcaaagggcgaaaaaccgtctatcagggcgatggcccactacgtgaaccatcaccctaatcaagttttttggggtcgaggtgccgtaaagcactaaatcggaaccctaaagggagcccccgatttagagcttgacggggaaagccggcgaacgtggcgagaaaggaagggaagaaagcgaaaggagcgggcgctagggcgctggcaagtgtagcggtcacgctgcgcgtaaccaccacacccgccgcgcttaatgcgccgctacagggcgcgtcaggtg

SEQ ID NO: 3264 - DNA, 4346 bp, Artificial Sequence
  Synthetic Construct, AT-107 intein modified protein encoding nucleic acids in pBluescript
gcacttttcggggaaatgtgcgcggaacccctatttgtttatttttctaaatacattcaaatatgtatccgctcatgagacaataaccctgataaatgcttcaataatattgaaaaaggaagagtatgagtattcaacatttccgtgtcgcccttattcccttttttgcggcattttgccttcctgtttttgctcacccagaaacgctggtgaaagtaaaagatgctgaagatcagttgggtgcacgagtgggttacatcgaactggatctcaacagcggtaagatccttgagagttttcgccccgaagaacgttttccaatgatgagcacttttaaagttctgctatgtggcgcggtattatcccgtattgacgccgggcaagagcaactcggtcgccgcatacactattctcagaatgacttggttgagtactcaccagtcacagaaaagcatcttacggatggcatgacagtaagagaattatgcagtgctgccataaccatgagtgataacactgcggccaacttacttctgacaacgatcggaggaccgaaggagctaaccgcttttttgcacaacatgggggatcatgtaactcgccttgatcgttgggaaccggagctgaatgaagccataccaaacgacgagcgtgacaccacgatgcctgtagcaatggcaacaacgttgcgcaaactattaactggcgaactacttactctagcttcccggcaacaattaatagactggatggaggcggataaagttgcaggaccacttctgcgctcggcccttccggctggctggtttattgctgataaatctggagccggtgagcgtgggtctcgcggtatcattgcagcactggggccagatggtaagccctcccgtatcgtagttatctacacgacggggagtcaggcaactatggatgaacgaaatagacagatcgctgagataggtgcctcactgattaagcattggtaactgtcagaccaagtttactcatatatactttagattgatttaaaacttcatttttaatttaaaaggatctaggtgaagatcctttttgataatctcatgaccaaaatcccttaacgtgagttttcgttccactgagcgtcagaccccgtagaaaagatcaaaggatcttcttgagatcctttttttctgcgcgtaatctgctgcttgcaaacaaaaaaaccaccgctaccagcggtggtttgtttgccggatcaagagctaccaactctttttccgaaggtaactggcttcagcagagcgcagataccaaatactgtccttctagtgtagccgtagttaggccaccacttcaagaactctgtagcaccgcctacatacctcgctctgctaatcctgttaccagtggctgctgccagtggcgataagtcgtgtcttaccgggttggactcaagacgatagttaccggataaggcgcagcggtcgggctgaacggggggttcgtgcacacagcccagcttggagcgaacgacctacaccgaactgagatacctacagcgtgagctatgagaaagcgccacgcttcccgaagggagaaaggcggacaggtatccggtaagcggcagggtcggaacaggagagcgcacgagggagcttccagggggaaacgcctggtatctttatagtcctgtcgggtttcgccacctctgacttgagcgtcgatttttgtgatgctcgtcaggggggcggagcctatggaaaaacgccagcaacgcggcctttttacggttcctggccttttgctggccttttgctcacatgttctttcctgcgttatcccctgattctgtggataaccgtattaccgcctttgagtgagctgataccgctcgccgcagccgaacgaccgagcgcagcgagtcagtgagcgaggaagcggaagagcgcccaatacgcaaaccgcctctccccgcgcgttggccgattcattaatgcagctggcacgacaggtttcccgactggaaagcgggcagtgagcgcaacgcaattaatgtgagttagctcactcattaggcaccccaggctttacactttatgcttccggctcgtatgttgtgtggaattgtgagcggataacaatttcacacaggaaacagcatatgcaaacaagcattactctgacatccaacgcatccggtacgtttgacggttactattacgaactctggaaggatactggcaatacaacaatgacggtctacactcaaggtcgcttttcctgccagtggtcgaacatcaataacgcgttgtttaggaccgggaagaaatacaaccagaattggcagtctcttggcacaatccggatcacgtactctgcgacttacaacccaaacgggaactcctacttgtgtatctatggctggtctaccaacccattggtcgagttctacatcgttgagtcctgggggaactggagaccgcctggtgcctgcttcgctagggatacggaggtttactacgagaatgacacagttccgcacatggagtcaatcgaggagatgtactcaaagtacgcttccatgaacggcgagctcccgttcgacaatgggtacgcggtcccactcgataacgtgttcgtctacaccctggacatcgctagcggcgagattaagaagacgcgcgcctcgtacatctacagggagaaggtggagaagctcatcgagattaagctgtccagcggctactcactcaaggttacaccatcccacccagtgctcctgttccgggatgggctgcagtgggtgccagctgctgaggtcaagcctggcgacgtggtcgttggggtccgcgaggaggttctcaggaggcggatcatttccaagggcgagctggagttccatgaggtttcgtctgtgaggatcattgattacaacaattgggtctacgatctcgtcattccagagactcataacttcattgctccaaatgggctcgtgctccacaacacgtccctgggccaagtgacaatcgatggcgggacctacgacatctataggacgacacgcgtcaaccagccttccattgtggggacagccacgttcgatcagtactggagcgtgcgcacctctaagcggacttcaggaacagtgaccgtgaccgatcacttccgcgcctgggcgaaccggggcctgaacctcggcacaatagaccaaattacattgtgcgtggagggttaccaaagctctggatcagccaacatcacccagaacaccttctctcagggctcttcttccggcagttcgggtggctcatccggctccacaacgactactcgcatcgagtgtgagaacatgtccttgtccggaccctacgttagcaggatcaccaatccctttaatggtattgcgctgtacgccaacggagacacagcccgcgctaccgttaacttccccgcaagtcgcaactacaatttccgcctgcggggttgcggcaacaacaataatcttgcccgtgtggacctgaggatcgacggacggaccgtcgggaccttttattaccagggcacatacccctgggaggccccaattgacaatgtttatgtcagtgcggggagtcatacagtcgaaatcactgttactgcggataacggcacatgggacgtgtatgccgactacctggtgatacagtgactcgagggggggcccggtacccaattcgccctatagtgagtcgtattacaattcactggccgtcgttttacaacgtcgtgactgggaaaaccctggcgttacccaacttaatcgccttgcagcacatccccctttcgccagctggcgtaatagcgaagaggcccgcaccgatcgcccttcccaacagttgcgcagcctgaatggcgaatggaaattgtaagcgttaatattttgttaaaattcgcgttaaatttttgttaaatcagctcattttttaaccaataggccgaaatcggcaaaatcccttataaatcaaaagaatagaccgagatagggttgagtgttgttccagtttggaacaagagtccactattaaagaacgtggactccaacgtcaaagggcgaaaaaccgtctatcagggcgatggcccactacgtgaaccatcaccctaatcaagttttttggggtcgaggtgccgtaaagcactaaatcggaaccctaaagggagcccccgatttagagcttgacggggaaagccggcgaacgtggcgagaaaggaagggaagaaagcgaaaggagcgggcgctagggcgctggcaagtgtagcggtcacgctgcgcgtaaccaccacacccgccgcgcttaatgcgccgctacagggcgcgtcaggtg

SEQ ID NO: 3265 - DNA, 5060 bp, Artificial Sequence
  Synthetic Construct, AT-108 intein modified protein encoding nucleic acids in pBluescript
gcacttttcggggaaatgtgcgcggaacccctatttgtttatttttctaaatacattcaaatatgtatccgctcatgagacaataaccctgataaatgcttcaataatattgaaaaaggaagagtatgagtattcaacatttccgtgtcgcccttattcccttttttgcggcattttgccttcctgtttttgctcacccagaaacgctggtgaaagtaaaagatgctgaagatcagttgggtgcacgagtgggttacatcgaactggatctcaacagcggtaagatccttgagagttttcgccccgaagaacgttttccaatgatgagcacttttaaagttctgctatgtggcgcggtattatcccgtattgacgccgggcaagagcaactcggtcgccgcatacactattctcagaatgacttggttgagtactcaccagtcacagaaaagcatcttacggatggcatgacagtaagagaattatgcagtgctgccataaccatgagtgataacactgcggccaacttacttctgacaacgatcggaggaccgaaggagctaaccgcttttttgcacaacatgggggatcatgtaactcgccttgatcgttgggaaccggagctgaatgaagccataccaaacgacgagcgtgacaccacgatgcctgtagcaatggcaacaacgttgcgcaaactattaactggcgaactacttactctagcttcccggcaacaattaatagactggatggaggcggataaagttgcaggaccacttctgcgctcggcccttccggctggctggtttattgctgataaatctggagccggtgagcgtgggtctcgcggtatcattgcagcactggggccagatggtaagccctcccgtatcgtagttatctacacgacggggagtcaggcaactatggatgaacgaaatagacagatcgctgagataggtgcctcactgattaagcattggtaactgtcagaccaagtttactcatatatactttagattgatttaaaacttcatttttaatttaaaaggatctaggtgaagatcctttttgataatctcatgaccaaaatcccttaacgtgagttttcgttccactgagcgtcagaccccgtagaaaagatcaaaggatcttcttgagatcctttttttctgcgcgtaatctgctgcttgcaaacaaaaaaaccaccgctaccagcggtggtttgtttgccggatcaagagctaccaactctttttccgaaggtaactggcttcagcagagcgcagataccaaatactgtccttctagtgtagccgtagttaggccaccacttcaagaactctgtagcaccgcctacatacctcgctctgctaatcctgttaccagtggctgctgccagtggcgataagtcgtgtcttaccgggttggactcaagacgatagttaccggataaggcgcagcggtcgggctgaacggggggttcgtgcacacagcccagcttggagcgaacgacctacaccgaactgagatacctacagcgtgagctatgagaaagcgccacgcttcccgaagggagaaaggcggacaggtatccggtaagcggcagggtcggaacaggagagcgcacgagggagcttccagggggaaacgcctggtatctttatagtcctgtcgggtttcgccacctctgacttgagcgtcgatttttgtgatgctcgtcaggggggcggagcctatggaaaaacgccagcaacgcggcctttttacggttcctggccttttgctggccttttgctcacatgttctttcctgcgttatcccctgattctgtggataaccgtattaccgcctttgagtgagctgataccgctcgccgcagccgaacgaccgagcgcagcgagtcagtgagcgaggaagcggaagagcgcccaatacgcaaaccgcctctccccgcgcgttggccgattcattaatgcagctggcacgacaggtttcccgactggaaagcgggcagtgagcgcaacgcaattaatgtgagttagctcactcattaggcaccccaggctttacactttatgcttccggctcgtatgttgtgtggaattgtgagcggataacaatttcacacaggaaacagcatatgcaaacaagcattactctgacatccaacgcatccggtacgtttgacggttactattacgaactctggaaggatactggcaatacaacaatgacggtctacactcaaggtcgcttttcctgccagtggtcgaacatcaataacgcgttgtttaggaccgggaagaaatacaaccagaattggcagtctcttggcacaatccggatcacgtactctgcgacttacaacccaaacgggaactcctacttgtgtatctatggctggtctaccaacccattggtcgagttctacatcgttgagtcctgggggaactggagaccgcctggtgcctgcgttaccccagacacgctggtttcgctctcggacgggcggattattgagatcagggaggcggtggagaactcggaggagtcgctgctcgggatcaacggcctgaagccgaaggaggccaaggcgctcaagttctgggagatcgactgggatgggccgatcaaggtcatcaagctgaagaatggccacgagatcaaggctaccccagaccatgggctcctggttatgagggatgggaagatcggctgggtgtcggctaagaacattcgggagggcgactacgtcgccttcatctacaatctcgggcaccgcggcgggaagaagtacacgctcccccagctcctgaaggagctgggcatctccgagtacgagaactccagctcgcaggagctcaacaatcgcgagcaggagatggactccaagcagatcagcattgagctggatgagaggttctggtacatcttcggcgtgattctcggcaaggggaccctgaagggggacaaggtggtcatcttccagaaggatgtcaagccggttattgaggaggcgctgcccttcgtccggatcttcgagtcggctgaccacatcggcttctctcatctcattctggctgaggtcttccgcaggctcggcgttggggagggcaagctccactccctggtgttcggcctgagggaggagtacatcaacgctatgattgccgggtacttcgacgctagcggcaccttcctcaggagggctgtcctgacgagcaagcgcggcgatatcctcaggatgctgtcggtgtacctctaccagatcggcattgtcaacaatctgaggagggacgagcatgctggcgtgtgggagctcatcatttctgatctggagaagttccgcgagaagatctacccttacctcaggattaagaagtcacagttcgacaaggtctactctatttcaaagaacgagggcgatttcctcccggttgcgtctatcttccggaagctgaagttccgcgacggcttcaagaatcggatcctcgacgaggagattccacgcgatgaggtggcgaaggtcctggagtacgctgaggactcacctgagaaggagttcctcaactccctggttgaggccagggtgacatgggttcgggtggagaagatcgaggagaggcattacactggcaagctctacgacttcacaactactacagagaacttcatttccaatggcatcgtctcacacaacacgtccctgggccaagtgacaatcgatggcgggacctacgacatctataggacgacacgcgtcaaccagccttccattgtggggacagccacgttcgatcagtactggagcgtgcgcacctctaagcggacttcaggaacagtgaccgtgaccgatcacttccgcgcctgggcgaaccggggcctgaacctcggcacaatagaccaaattacattgtgcgtggagggttaccaaagctctggatcagccaacatcacccagaacaccttctctcagggctcttcttccggcagttcgggtggctcatccggctccacaacgactactcgcatcgagtgtgagaacatgtccttgtccggaccctacgttagcaggatcaccaatccctttaatggtattgcgctgtacgccaacggagacacagcccgcgctaccgttaacttccccgcaagtcgcaactacaatttccgcctgcggggttgcggcaacaacaataatcttgcccgtgtggacctgaggatcgacggacggaccgtcgggaccttttattaccagggcacatacccctgggaggccccaattgacaatgtttatgtcagtgcggggagtcatacagtcgaaatcactgttactgcggataacggcacatgggacgtgtatgccgactacctggtgatacagtgactcgagggggggcccggtacccaattcgccctatagtgagtcgtattacaattcactggccgtcgttttacaacgtcgtgactgggaaaaccctggcgttacccaacttaatcgccttgcagcacatccccctttcgccagctggcgtaatagcgaagaggcccgcaccgatcgcccttcccaacagttgcgcagcctgaatggcgaatggaaattgtaagcgttaatattttgttaaaattcgcgttaaatttttgttaaatcagctcattttttaaccaataggccgaaatcggcaaaatcccttataaatcaaaagaatagaccgagatagggttgagtgttgttccagtttggaacaagagtccactattaaagaacgtggactccaacgtcaaagggcgaaaaaccgtctatcagggcgatggcccactacgtgaaccatcaccctaatcaagttttttggggtcgaggtgccgtaaagcactaaatcggaaccctaaagggagcccccgatttagagcttgacggggaaagccggcgaacgtggcgagaaaggaagggaagaaagcgaaaggagcgggcgctagggcgctggcaagtgtagcggtcacgctgcgcgtaaccaccacacccgccgcgcttaatgcgccgctacagggcgcgtcaggtg

SEQ ID NO: 3266 - DNA, 5000 bp, Artificial Sequence
  Synthetic Construct, AT-109 intein modified protein encoding nucleic acids in pBluescript
gcacttttcggggaaatgtgcgcggaacccctatttgtttatttttctaaatacattcaaatatgtatccgctcatgagacaataaccctgataaatgcttcaataatattgaaaaaggaagagtatgagtattcaacatttccgtgtcgcccttattcccttttttgcggcattttgccttcctgtttttgctcacccagaaacgctggtgaaagtaaaagatgctgaagatcagttgggtgcacgagtgggttacatcgaactggatctcaacagcggtaagatccttgagagttttcgccccgaagaacgttttccaatgatgagcacttttaaagttctgctatgtggcgcggtattatcccgtattgacgccgggcaagagcaactcggtcgccgcatacactattctcagaatgacttggttgagtactcaccagtcacagaaaagcatcttacggatggcatgacagtaagagaattatgcagtgctgccataaccatgagtgataacactgcggccaacttacttctgacaacgatcggaggaccgaaggagctaaccgcttttttgcacaacatgggggatcatgtaactcgccttgatcgttgggaaccggagctgaatgaagccataccaaacgacgagcgtgacaccacgatgcctgtagcaatggcaacaacgttgcgcaaactattaactggcgaactacttactctagcttcccggcaacaattaatagactggatggaggcggataaagttgcaggaccacttctgcgctcggcccttccggctggctggtttattgctgataaatctggagccggtgagcgtgggtctcgcggtatcattgcagcactggggccagatggtaagccctcccgtatcgtagttatctacacgacggggagtcaggcaactatggatgaacgaaatagacagatcgctgagataggtgcctcactgattaagcattggtaactgtcagaccaagtttactcatatatactttagattgatttaaaacttcatttttaatttaaaaggatctaggtgaagatcctttttgataatctcatgaccaaaatcccttaacgtgagttttcgttccactgagcgtcagaccccgtagaaaagatcaaaggatcttcttgagatcctttttttctgcgcgtaatctgctgcttgcaaacaaaaaaaccaccgctaccagcggtggtttgtttgccggatcaagagctaccaactctttttccgaaggtaactggcttcagcagagcgcagataccaaatactgtccttctagtgtagccgtagttaggccaccacttcaagaactctgtagcaccgcctacatacctcgctctgctaatcctgttaccagtggctgctgccagtggcgataagtcgtgtcttaccgggttggactcaagacgatagttaccggataaggcgcagcggtcgggctgaacggggggttcgtgcacacagcccagcttggagcgaacgacctacaccgaactgagatacctacagcgtgagctatgagaaagcgccacgcttcccgaagggagaaaggcggacaggtatccggtaagcggcagggtcggaacaggagagcgcacgagggagcttccagggggaaacgcctggtatctttatagtcctgtcgggtttcgccacctctgacttgagcgtcgatttttgtgatgctcgtcaggggggcggagcctatggaaaaacgccagcaacgcggcctttttacggttcctggccttttgctggccttttgctcacatgttctttcctgcgttatcccctgattctgtggataaccgtattaccgcctttgagtgagctgataccgctcgccgcagccgaacgaccgagcgcagcgagtcagtgagcgaggaagcggaagagcgcccaatacgcaaaccgcctctccccgcgcgttggccgattcattaatgcagctggcacgacaggtttcccgactggaaagcgggcagtgagcgcaacgcaattaatgtgagttagctcactcattaggcaccccaggctttacactttatgcttccggctcgtatgttgtgtggaattgtgagcggataacaatttcacacaggaaacagcatatgcaaacaagcattactctgacatccaacgcatccggtacgtttgacggttactattacgaactctggaaggatactggcaatacaacaatgacggtctacactcaaggtcgcttttcctgccagtggtcgaacatcaataacgcgttgtttaggaccgggaagaaatacaaccagaattggcagtctcttggcacaatccggatcacgtactctgcgacttacaacccaaacgggaactcctacttgtgtatctatggctggtctaccaacccattggtcgagttctacatcgttgagtcctgggggaactggagaccgcctggtgcctgcctcgcgcctgggacaagggtcctgactgagcatggctactggctgaagattgaggagatgcctgagaagttcaagctgcagcggctccgcgtctacaacatcgaggagggccacaatgacttcagcaaggtggtcttcgtggctgagagggaggtcggctcggaggagaaggctatccgcattgtcacagagtccgggaaggttatcgagggcagcgaggaccatccagtgctcactcctgagggctacgtgtacctgaggaacgtgaaggagggcgattacatcctggtgtacccgttcgagggggtcccctacgaggagaagaagggcgtcattctcgacgagtccgctttcgagggcgaggatccgcaggttgtgaagttcctgcgcgagaggaacctcatcccactgcagtggaaggaccctaaagtgggcatcctcgctcggattctggggttcgctctcgcgaatggctacatcagcgagaacgataatctcaccttccacggcaaggaggaggtcctgagggaggttcggaaggacctggaggagctgggcatcgaggcgattgtcgctgaggaggataagctcaaggttacgtctagggagttcgctttcctcctggagaagctggggatggcccacgactcaatcccggagtggatcattgagggccccctctggattaagaggaacttcctcgctggcctgttcggggctaatggctcgatcgttgagttcaagggcgacgtgccgctgcccattaccctcacgcattcgcgggagctcctgaacgatgtctctcgcatcctggagggcttcaaggtgagggccaagattaagatggggaagaatggctcataccagctcgtcatcgaggacgaggattccattcgcaacttcctggggaggatcaattacgagtacgacccagagaagaaggccaggggcctcattgcttacgcctacctgaagttcaaggagctcatgaaggggaacctgatgaccttcgaggagttcgcccgggacaggggctacgagggcgggttcgtggcggagaaggtcatcgaggttaagagcgtgaagccggagtacgataagttctacgatattggggtctaccactcagctcataatttcattgctaatggcatcgtcgttcataacacgtccctgggccaagtgacaatcgatggcgggacctacgacatctataggacgacacgcgtcaaccagccttccattgtggggacagccacgttcgatcagtactggagcgtgcgcacctctaagcggacttcaggaacagtgaccgtgaccgatcacttccgcgcctgggcgaaccggggcctgaacctcggcacaatagaccaaattacattgtgcgtggagggttaccaaagctctggatcagccaacatcacccagaacaccttctctcagggctcttcttccggcagttcgggtggctcatccggctccacaacgactactcgcatcgagtgtgagaacatgtccttgtccggaccctacgttagcaggatcaccaatccctttaatggtattgcgctgtacgccaacggagacacagcccgcgctaccgttaacttccccgcaagtcgcaactacaatttccgcctgcggggttgcggcaacaacaataatcttgcccgtgtggacctgaggatcgacggacggaccgtcgggaccttttattaccagggcacatacccctgggaggccccaattgacaatgtttatgtcagtgcggggagtcatacagtcgaaatcactgttactgcggataacggcacatgggacgtgtatgccgactacctggtgatacagtgactcgagggggggcccggtacccaattcgccctatagtgagtcgtattacaattcactggccgtcgttttacaacgtcgtgactgggaaaaccctggcgttacccaacttaatcgccttgcagcacatccccctttcgccagctggcgtaatagcgaagaggcccgcaccgatcgcccttcccaacagttgcgcagcctgaatggcgaatggaaattgtaagcgttaatattttgttaaaattcgcgttaaatttttgttaaatcagctcattttttaaccaataggccgaaatcggcaaaatcccttataaatcaaaagaatagaccgagatagggttgagtgttgttccagtttggaacaagagtccactattaaagaacgtggactccaacgtcaaagggcgaaaaaccgtctatcagggcgatggcccactacgtgaaccatcaccctaatcaagttttttggggtcgaggtgccgtaaagcactaaatcggaaccctaaagggagcccccgatttagagcttgacggggaaagccggcgaacgtggcgagaaaggaagggaagaaagcgaaaggagcgggcgctagggcgctggcaagtgtagcggtcacgctgcgcgtaaccaccacacccgccgcgcttaatgcgccgctacagggcgcgtcaggtg

SEQ ID NO: 3267 - DNA, 4958 bp, Artificial Sequence
  Synthetic Construct, AT-110 intein modified protein encoding nucleic acids in pBluescript
gcacttttcggggaaatgtgcgcggaacccctatttgtttatttttctaaatacattcaaatatgtatccgctcatgagacaataaccctgataaatgcttcaataatattgaaaaaggaagagtatgagtattcaacatttccgtgtcgcccttattcccttttttgcggcattttgccttcctgtttttgctcacccagaaacgctggtgaaagtaaaagatgctgaagatcagttgggtgcacgagtgggttacatcgaactggatctcaacagcggtaagatccttgagagttttcgccccgaagaacgttttccaatgatgagcacttttaaagttctgctatgtggcgcggtattatcccgtattgacgccgggcaagagcaactcggtcgccgcatacactattctcagaatgacttggttgagtactcaccagtcacagaaaagcatcttacggatggcatgacagtaagagaattatgcagtgctgccataaccatgagtgataacactgcggccaacttacttctgacaacgatcggaggaccgaaggagctaaccgcttttttgcacaacatgggggatcatgtaactcgccttgatcgttgggaaccggagctgaatgaagccataccaaacgacgagcgtgacaccacgatgcctgtagcaatggcaacaacgttgcgcaaactattaactggcgaactacttactctagcttcccggcaacaattaatagactggatggaggcggataaagttgcaggaccacttctgcgctcggcccttccggctggctggtttattgctgataaatctggagccggtgagcgtgggtctcgcggtatcattgcagcactggggccagatggtaagccctcccgtatcgtagttatctacacgacggggagtcaggcaactatggatgaacgaaatagacagatcgctgagataggtgcctcactgattaagcattggtaactgtcagaccaagtttactcatatatactttagattgatttaaaacttcatttttaatttaaaaggatctaggtgaagatcctttttgataatctcatgaccaaaatcccttaacgtgagttttcgttccactgagcgtcagaccccgtagaaaagatcaaaggatcttcttgagatcctttttttctgcgcgtaatctgctgcttgcaaacaaaaaaaccaccgctaccagcggtggtttgtttgccggatcaagagctaccaactctttttccgaaggtaactggcttcagcagagcgcagataccaaatactgtccttctagtgtagccgtagttaggccaccacttcaagaactctgtagcaccgcctacatacctcgctctgctaatcctgttaccagtggctgctgccagtggcgataagtcgtgtcttaccgggttggactcaagacgatagttaccggataaggcgcagcggtcgggctgaacggggggttcgtgcacacagcccagcttggagcgaacgacctacaccgaactgagatacctacagcgtgagctatgagaaagcgccacgcttcccgaagggagaaaggcggacaggtatccggtaagcggcagggtcggaacaggagagcgcacgagggagcttccagggggaaacgcctggtatctttatagtcctgtcgggtttcgccacctctgacttgagcgtcgatttttgtgatgctcgtcaggggggcggagcctatggaaaaacgccagcaacgcggcctttttacggttcctggccttttgctggccttttgctcacatgttctttcctgcgttatcccctgattctgtggataaccgtattaccgcctttgagtgagctgataccgctcgccgcagccgaacgaccgagcgcagcgagtcagtgagcgaggaagcggaagagcgcccaatacgcaaaccgcctctccccgcgcgttggccgattcattaatgcagctggcacgacaggtttcccgactggaaagcgggcagtgagcgcaacgcaattaatgtgagttagctcactcattaggcaccccaggctttacactttatgcttccggctcgtatgttgtgtggaattgtgagcggataacaatttcacacaggaaacagcatatgcaaacaagcattactctgacatccaacgcatccggtacgtttgacggttactattacgaactctggaaggatactggcaatacaacaatgacggtctacactcaaggtcgcttttcctgccagtggtcgaacatcaataacgcgttgtttaggaccgggaagaaatacaaccagaattggcagtctcttggcacaatccggatcacgtactctgcgacttacaacccaaacgggaactcctacttgtgtatctatggctggtctaccaacccattggtcgagttctacatcgttgagtcctgggggaactggagaccgcctggtgcctgcgtggacggggacacactggtgctgacaaaggagttcgggctcatcaagatcaaggagctctacgagaagctggacggcaaggggcgcaagattgtggagggcaacgaggagtggaccgagctggagaagccaatcacggtctacggctacaaggacgggaagatcgttgagattaaggccacccacgtttacaagggcgtgtccagcgggatggtcgagatcaggacccggacgggccggaagatcaaggtgacgccgattcaccgcctgttcacaggcagggtcactaaggacgggctgatcctcaaggaggtcatggctatgcatgttaagcccggcgataggatcgccgtggtcaagaagattgacggcggggagtacatcaagctcgattcgtctaacgtgggcgagatcaaggtcccggagattctcaatgaggagctggcggagttcctcggctacctgatggctaacggcacactgaagtcggggatcattgagatctactgcgacgatgagtctctcctggagagggtgaactccctgtccctcaagctgttcggcgtcggcgggcggattgtccagaaggttgacgggaaggcgctcgtgatccagagcaagccactggtcgacgttctcaggaggctgggcgtccctgaggataagaaggttgagaactggaaggtgccgcgggagctcctgctcagcccatcgaacgttgtgcgcgccttcgttaatgcgtacattaagggcaaggaggaggtcgagatcaccctcgcttccgaggagggggcttacgagctcagctacctgttcgctaagctgggcatctacgtgacaatttctaagtcaggggagtactacaaggtgcgcgtctcgcggaggggcaacctcgacactatcccagttgaagtgaatgggatgccaaaggtgctgccttacgaggatttcaggaagttcgccaagtccatcggcctggaggaggtcgcggagaatcacctgcagcatatcattttcgacgaggtcatcgatgtcaggtacattccggagccccaggaggtgtacgatgttactacagagactcataatttcgtggggggcaacatgccaactctgctccacaatacgtccctgggccaagtgacaatcgatggcgggacctacgacatctataggacgacacgcgtcaaccagccttccattgtggggacagccacgttcgatcagtactggagcgtgcgcacctctaagcggacttcaggaacagtgaccgtgaccgatcacttccgcgcctgggcgaaccggggcctgaacctcggcacaatagaccaaattacattgtgcgtggagggttaccaaagctctggatcagccaacatcacccagaacaccttctctcagggctcttcttccggcagttcgggtggctcatccggctccacaacgactactcgcatcgagtgtgagaacatgtccttgtccggaccctacgttagcaggatcaccaatccctttaatggtattgcgctgtacgccaacggagacacagcccgcgctaccgttaacttccccgcaagtcgcaactacaatttccgcctgcggggttgcggcaacaacaataatcttgcccgtgtggacctgaggatcgacggacggaccgtcgggaccttttattaccagggcacatacccctgggaggccccaattgacaatgtttatgtcagtgcggggagtcatacagtcgaaatcactgttactgcggataacggcacatgggacgtgtatgccgactacctggtgatacagtgactcgagggggggcccggtacccaattcgccctatagtgagtcgtattacaattcactggccgtcgttttacaacgtcgtgactgggaaaaccctggcgttacccaacttaatcgccttgcagcacatccccctttcgccagctggcgtaatagcgaagaggcccgcaccgatcgcccttcccaacagttgcgcagcctgaatggcgaatggaaattgtaagcgttaatattttgttaaaattcgcgttaaatttttgttaaatcagctcattttttaaccaataggccgaaatcggcaaaatcccttataaatcaaaagaatagaccgagatagggttgagtgttgttccagtttggaacaagagtccactattaaagaacgtggactccaacgtcaaagggcgaaaaaccgtctatcagggcgatggcccactacgtgaaccatcaccctaatcaagttttttggggtcgaggtgccgtaaagcactaaatcggaaccctaaagggagcccccgatttagagcttgacggggaaagccggcgaacgtggcgagaaaggaagggaagaaagcgaaaggagcgggcgctagggcgctggcaagtgtagcggtcacgctgcgcgtaaccaccacacccgccgcgcttaatgcgccgctacagggcgcgtcaggtg

SEQ ID NO: 3268 - DNA, 4952 bp, Artificial Sequence
  Synthetic Construct, AT-111 intein modified protein encoding nucleic acids in pBluescript
gcacttttcggggaaatgtgcgcggaacccctatttgtttatttttctaaatacattcaaatatgtatccgctcatgagacaataaccctgataaatgcttcaataatattgaaaaaggaagagtatgagtattcaacatttccgtgtcgcccttattcccttttttgcggcattttgccttcctgtttttgctcacccagaaacgctggtgaaagtaaaagatgctgaagatcagttgggtgcacgagtgggttacatcgaactggatctcaacagcggtaagatccttgagagttttcgccccgaagaacgttttccaatgatgagcacttttaaagttctgctatgtggcgcggtattatcccgtattgacgccgggcaagagcaactcggtcgccgcatacactattctcagaatgacttggttgagtactcaccagtcacagaaaagcatcttacggatggcatgacagtaagagaattatgcagtgctgccataaccatgagtgataacactgcggccaacttacttctgacaacgatcggaggaccgaaggagctaaccgcttttttgcacaacatgggggatcatgtaactcgccttgatcgttgggaaccggagctgaatgaagccataccaaacgacgagcgtgacaccacgatgcctgtagcaatggcaacaacgttgcgcaaactattaactggcgaactacttactctagcttcccggcaacaattaatagactggatggaggcggataaagttgcaggaccacttctgcgctcggcccttccggctggctggtttattgctgataaatctggagccggtgagcgtgggtctcgcggtatcattgcagcactggggccagatggtaagccctcccgtatcgtagttatctacacgacggggagtcaggcaactatggatgaacgaaatagacagatcgctgagataggtgcctcactgattaagcattggtaactgtcagaccaagtttactcatatatactttagattgatttaaaacttcatttttaatttaaaaggatctaggtgaagatcctttttgataatctcatgaccaaaatcccttaacgtgagttttcgttccactgagcgtcagaccccgtagaaaagatcaaaggatcttcttgagatcctttttttctgcgcgtaatctgctgcttgcaaacaaaaaaaccaccgctaccagcggtggtttgtttgccggatcaagagctaccaactctttttccgaaggtaactggcttcagcagagcgcagataccaaatactgtccttctagtgtagccgtagttaggccaccacttcaagaactctgtagcaccgcctacatacctcgctctgctaatcctgttaccagtggctgctgccagtggcgataagtcgtgtcttaccgggttggactcaagacgatagttaccggataaggcgcagcggtcgggctgaacggggggttcgtgcacacagcccagcttggagcgaacgacctacaccgaactgagatacctacagcgtgagctatgagaaagcgccacgcttcccgaagggagaaaggcggacaggtatccggtaagcggcagggtcggaacaggagagcgcacgagggagcttccagggggaaacgcctggtatctttatagtcctgtcgggtttcgccacctctgacttgagcgtcgatttttgtgatgctcgtcaggggggcggagcctatggaaaaacgccagcaacgcggcctttttacggttcctggccttttgctggccttttgctcacatgttctttcctgcgttatcccctgattctgtggataaccgtattaccgcctttgagtgagctgataccgctcgccgcagccgaacgaccgagcgcagcgagtcagtgagcgaggaagcggaagagcgcccaatacgcaaaccgcctctccccgcgcgttggccgattcattaatgcagctggcacgacaggtttcccgactggaaagcgggcagtgagcgcaacgcaattaatgtgagttagctcactcattaggcaccccaggctttacactttatgcttccggctcgtatgttgtgtggaattgtgagcggataacaatttcacacaggaaacagcatatgcaaacaagcattactctgacatccaacgcatccggtacgtttgacggttactattacgaactctggaaggatactggcaatacaacaatgacggtctacactcaaggtcgcttttcctgccagtggtcgaacatcaataacgcgttgtttaggaccgggaagaaatacaaccagaattggcagtctcttggcacaatccggatcacgtactctgcgacttacaacccaaacgggaactcctacttgtgtatctatggctggtctaccaacccattggtcgagttctacatcgttgagtcctgggggaactggagaccgcctggtgcctgcgttaccgctgacacaaggctcgctacacagcatgggctggtccctatcgggtggctgcaggctaatgggggggctctggactgcacggtggacaggagggctctgggcgaggataggagggggacagttactcgcgccgctgtgccagcgttcctcagcgctggccaggctgaggtcttcaaggttaccacggccgagggctaccagatcaaggccacagcgtggcacgagttctacactgctaggggcaagctcaagctgtcggagctcaaggctggggacgagctgtgggtccagtccggcaaggggcagttcggcgctcagggcagcggggctctcggcctcctgatcgggctgattaccggcgacgggcatttcacgaaccgcggcaaggatgagcaggctgccgttatctccctgtggggcgaggagaggcagctcgctgacgatatcgccggctctgtcaatgccctcattgctgggacctcactggctccgcgcgactacctcgtgaagccagttgctgtggccgagcggaacatggtcttcattcgctcaaccatgctcgtcagggttctggatggctacgggttcaatggcgagacgaagctggaggtgccagaggtggtctggaggggctccgaggcttgcatgaggggctacctccaggggctgttccagacagacggcactgtgaacgtctccagcaattcccagagctgctcggtgcggctgtcgtcttcacaccgccctctcctgcaggatgttcaggtgctcctggcgaacttcggcgtcttctcgcgcatccatgagaggagggaggctggcccaaggtctctcccagacgggcagggcgggcagagggattacctgtgccagacacagcacgagctcatcgtggacggcgagtctcgcgaggcgttcatgagggagattgggttcctcctgcccgctaagcgggagaagtacgacgcttgggtcgccgataaggcgctcgttaagacccagaggttcgcggctaccatcacggcgattgagccagctggcgtggagcctgtctacgatactactcagccagacggcaacacagtcatcttcaatgggctcgttacggggcagacgtccctgggccaagtgacaatcgatggcgggacctacgacatctataggacgacacgcgtcaaccagccttccattgtggggacagccacgttcgatcagtactggagcgtgcgcacctctaagcggacttcaggaacagtgaccgtgaccgatcacttccgcgcctgggcgaaccggggcctgaacctcggcacaatagaccaaattacattgtgcgtggagggttaccaaagctctggatcagccaacatcacccagaacaccttctctcagggctcttcttccggcagttcgggtggctcatccggctccacaacgactactcgcatcgagtgtgagaacatgtccttgtccggaccctacgttagcaggatcaccaatccctttaatggtattgcgctgtacgccaacggagacacagcccgcgctaccgttaacttccccgcaagtcgcaactacaatttccgcctgcggggttgcggcaacaacaataatcttgcccgtgtggacctgaggatcgacggacggaccgtcgggaccttttattaccagggcacatacccctgggaggccccaattgacaatgtttatgtcagtgcggggagtcatacagtcgaaatcactgttactgcggataacggcacatgggacgtgtatgccgactacctggtgatacagtgactcgagggggggcccggtacccaattcgccctatagtgagtcgtattacaattcactggccgtcgttttacaacgtcgtgactgggaaaaccctggcgttacccaacttaatcgccttgcagcacatccccctttcgccagctggcgtaatagcgaagaggcccgcaccgatcgcccttcccaacagttgcgcagcctgaatggcgaatggaaattgtaagcgttaatattttgttaaaattcgcgttaaatttttgttaaatcagctcattttttaaccaataggccgaaatcggcaaaatcccttataaatcaaaagaatagaccgagatagggttgagtgttgttccagtttggaacaagagtccactattaaagaacgtggactccaacgtcaaagggcgaaaaaccgtctatcagggcgatggcccactacgtgaaccatcaccctaatcaagttttttggggtcgaggtgccgtaaagcactaaatcggaaccctaaagggagcccccgatttagagcttgacggggaaagccggcgaacgtggcgagaaaggaagggaagaaagcgaaaggagcgggcgctagggcgctggcaagtgtagcggtcacgctgcgcgtaaccaccacacccgccgcgcttaatgcgccgctacagggcgcgtcaggtg

SEQ ID NO: 3269 - DNA, 5198 bp, Artificial Sequence
  Synthetic Construct, AT-112 intein modified protein encoding nucleic acids in pBluescript
gcacttttcggggaaatgtgcgcggaacccctatttgtttatttttctaaatacattcaaatatgtatccgctcatgagacaataaccctgataaatgcttcaataatattgaaaaaggaagagtatgagtattcaacatttccgtgtcgcccttattcccttttttgcggcattttgccttcctgtttttgctcacccagaaacgctggtgaaagtaaaagatgctgaagatcagttgggtgcacgagtgggttacatcgaactggatctcaacagcggtaagatccttgagagttttcgccccgaagaacgttttccaatgatgagcacttttaaagttctgctatgtggcgcggtattatcccgtattgacgccgggcaagagcaactcggtcgccgcatacactattctcagaatgacttggttgagtactcaccagtcacagaaaagcatcttacggatggcatgacagtaagagaattatgcagtgctgccataaccatgagtgataacactgcggccaacttacttctgacaacgatcggaggaccgaaggagctaaccgcttttttgcacaacatgggggatcatgtaactcgccttgatcgttgggaaccggagctgaatgaagccataccaaacgacgagcgtgacaccacgatgcctgtagcaatggcaacaacgttgcgcaaactattaactggcgaactacttactctagcttcccggcaacaattaatagactggatggaggcggataaagttgcaggaccacttctgcgctcggcccttccggctggctggtttattgctgataaatctggagccggtgagcgtgggtctcgcggtatcattgcagcactggggccagatggtaagccctcccgtatcgtagttatctacacgacggggagtcaggcaactatggatgaacgaaatagacagatcgctgagataggtgcctcactgattaagcattggtaactgtcagaccaagtttactcatatatactttagattgatttaaaacttcatttttaatttaaaaggatctaggtgaagatcctttttgataatctcatgaccaaaatcccttaacgtgagttttcgttccactgagcgtcagaccccgtagaaaagatcaaaggatcttcttgagatcctttttttctgcgcgtaatctgctgcttgcaaacaaaaaaaccaccgctaccagcggtggtttgtttgccggatcaagagctaccaactctttttccgaaggtaactggcttcagcagagcgcagataccaaatactgtccttctagtgtagccgtagttaggccaccacttcaagaactctgtagcaccgcctacatacctcgctctgctaatcctgttaccagtggctgctgccagtggcgataagtcgtgtcttaccgggttggactcaagacgatagttaccggataaggcgcagcggtcgggctgaacggggggttcgtgcacacagcccagcttggagcgaacgacctacaccgaactgagatacctacagcgtgagctatgagaaagcgccacgcttcccgaagggagaaaggcggacaggtatccggtaagcggcagggtcggaacaggagagcgcacgagggagcttccagggggaaacgcctggtatctttatagtcctgtcgggtttcgccacctctgacttgagcgtcgatttttgtgatgctcgtcaggggggcggagcctatggaaaaacgccagcaacgcggcctttttacggttcctggccttttgctggccttttgctcacatgttctttcctgcgttatcccctgattctgtggataaccgtattaccgcctttgagtgagctgataccgctcgccgcagccgaacgaccgagcgcagcgagtcagtgagcgaggaagcggaagagcgcccaatacgcaaaccgcctctccccgcgcgttggccgattcattaatgcagctggcacgacaggtttcccgactggaaagcgggcagtgagcgcaacgcaattaatgtgagttagctcactcattaggcaccccaggctttacactttatgcttccggctcgtatgttgtgtggaattgtgagcggataacaatttcacacaggaaacagcatatgcaaacaagcattactctgacatccaacgcatccggtacgtttgacggttactattacgaactctggaaggatactggcaatacaacaatgacggtctacactcaaggtcgcttttcctgccagtggtcgaacatcaataacgcgttgtttaggaccgggaagaaatacaaccagaattggcagtctcttggcacaatccggatcacgtactctgcgacttacaacccaaacgggaactcctacttgtgtatctatggctggtctaccaacccattggtcgagttctacatcgttgagtcctgggggaactggagaccgcctggtgcctgcctctctgcggatcatgaggttctcacatctacagggtggaaggctctccccgctattaaggatgcggatcaggttatgacgctggacctccagacgggcacacagcagtggaactcggtgcaggctaccacgaggttcgcgcgggagggctcactctacaggctgaagtccgacgatatggatgcggtctgcaacgagtctcaccgctggtacctcaatactaaggaccagccaacaacttacaccgctttcaccacgcagcagatgctggataaccagctcgtggctctgcgcaactcctccggcaaggctacggaccagtggaaccacgagtccgggacaactacccacacgaaccataatatccctacagtcggccataacgggaatgttatgttcagctggccagactgcccatggctcccacgcgagttcgtcgctgatgaggcgtgcaacctcgactggtgcaggttcatcggcctcgtgatgggcgacgggtcgattgatcatgtcacggacgctcagggccaggagcactacagcatccagattcatcagagggctgggaacccagcttcgaacgctaatacagaggatgtcctggagaggctggctgctaagctgccaaatttcgtggtccacccatcctgcgttagcggcgcggaggagaagcatacttggaccatcaaccaccgggacatgtaccatttcttcctccccatgatgcgcggcccacagtcctacgaccctctggataacgccatgtgcaggacctaccaggctccagattaccaggccctctcgcggtctgacaatgagcctatcattccagtgccagctgactggaagaccggcaactggtggcacctgcgcaggtggatcaattacccatggctcttctcgctggcccagtctcaggcgagggctatgattaagggcatggctgccgcgaacggggattggtcactctccctgaaggctaggctggacaccggcgattctggggttgtgagggttttcagcaattcgatccccctcatgcacgacatgtcagtgctgggcctcctggccgatactcgcgtgaacattggcgtcgaccataagaaggggcagatgcagctccaggtccctgttaccatgccggcgctcctggcttggtgcatctctttctcattcgcgaactccgacctggctgtggctgctccaaagcctgaggcgtacgataatccgaggcacgacggcttcgtttactgcctcacggtgcccaacgggaatttcctggcccggcgcacagtcgagtacagcgataatgataagattcaggaggtcattgatgctgctcagaagcctttcttcacaggcaacacgtccctgggccaagtgacaatcgatggcgggacctacgacatctataggacgacacgcgtcaaccagccttccattgtggggacagccacgttcgatcagtactggagcgtgcgcacctctaagcggacttcaggaacagtgaccgtgaccgatcacttccgcgcctgggcgaaccggggcctgaacctcggcacaatagaccaaattacattgtgcgtggagggttaccaaagctctggatcagccaacatcacccagaacaccttctctcagggctcttcttccggcagttcgggtggctcatccggctccacaacgactactcgcatcgagtgtgagaacatgtccttgtccggaccctacgttagcaggatcaccaatccctttaatggtattgcgctgtacgccaacggagacacagcccgcgctaccgttaacttccccgcaagtcgcaactacaatttccgcctgcggggttgcggcaacaacaataatcttgcccgtgtggacctgaggatcgacggacggaccgtcgggaccttttattaccagggcacatacccctgggaggccccaattgacaatgtttatgtcagtgcggggagtcatacagtcgaaatcactgttactgcggataacggcacatgggacgtgtatgccgactacctggtgatacagtgactcgagggggggcccggtacccaattcgccctatagtgagtcgtattacaattcactggccgtcgttttacaacgtcgtgactgggaaaaccctggcgttacccaacttaatcgccttgcagcacatccccctttcgccagctggcgtaatagcgaagaggcccgcaccgatcgcccttcccaacagttgcgcagcctgaatggcgaatggaaattgtaagcgttaatattttgttaaaattcgcgttaaatttttgttaaatcagctcattttttaaccaataggccgaaatcggcaaaatcccttataaatcaaaagaatagaccgagatagggttgagtgttgttccagtttggaacaagagtccactattaaagaacgtggactccaacgtcaaagggcgaaaaaccgtctatcagggcgatggcccactacgtgaaccatcaccctaatcaagttttttggggtcgaggtgccgtaaagcactaaatcggaaccctaaagggagcccccgatttagagcttgacggggaaagccggcgaacgtggcgagaaaggaagggaagaaagcgaaaggagcgggcgctagggcgctggcaagtgtagcggtcacgctgcgcgtaaccaccacacccgccgcgcttaatgcgccgctacagggcgcgtcaggtg

SEQ ID NO: 3270 - DNA, 4970 bp, Artificial Sequence
  Synthetic Construct, AT-113 intein modified protein encoding nucleic acids in pBluescript
gcacttttcggggaaatgtgcgcggaacccctatttgtttatttttctaaatacattcaaatatgtatccgctcatgagacaataaccctgataaatgcttcaataatattgaaaaaggaagagtatgagtattcaacatttccgtgtcgcccttattcccttttttgcggcattttgccttcctgtttttgctcacccagaaacgctggtgaaagtaaaagatgctgaagatcagttgggtgcacgagtgggttacatcgaactggatctcaacagcggtaagatccttgagagttttcgccccgaagaacgttttccaatgatgagcacttttaaagttctgctatgtggcgcggtattatcccgtattgacgccgggcaagagcaactcggtcgccgcatacactattctcagaatgacttggttgagtactcaccagtcacagaaaagcatcttacggatggcatgacagtaagagaattatgcagtgctgccataaccatgagtgataacactgcggccaacttacttctgacaacgatcggaggaccgaaggagctaaccgcttttttgcacaacatgggggatcatgtaactcgccttgatcgttgggaaccggagctgaatgaagccataccaaacgacgagcgtgacaccacgatgcctgtagcaatggcaacaacgttgcgcaaactattaactggcgaactacttactctagcttcccggcaacaattaatagactggatggaggcggataaagttgcaggaccacttctgcgctcggcccttccggctggctggtttattgctgataaatctggagccggtgagcgtgggtctcgcggtatcattgcagcactggggccagatggtaagccctcccgtatcgtagttatctacacgacggggagtcaggcaactatggatgaacgaaatagacagatcgctgagataggtgcctcactgattaagcattggtaactgtcagaccaagtttactcatatatactttagattgatttaaaacttcatttttaatttaaaaggatctaggtgaagatcctttttgataatctcatgaccaaaatcccttaacgtgagttttcgttccactgagcgtcagaccccgtagaaaagatcaaaggatcttcttgagatcctttttttctgcgcgtaatctgctgcttgcaaacaaaaaaaccaccgctaccagcggtggtttgtttgccggatcaagagctaccaactctttttccgaaggtaactggcttcagcagagcgcagataccaaatactgtccttctagtgtagccgtagttaggccaccacttcaagaactctgtagcaccgcctacatacctcgctctgctaatcctgttaccagtggctgctgccagtggcgataagtcgtgtcttaccgggttggactcaagacgatagttaccggataaggcgcagcggtcgggctgaacggggggttcgtgcacacagcccagcttggagcgaacgacctacaccgaactgagatacctacagcgtgagctatgagaaagcgccacgcttcccgaagggagaaaggcggacaggtatccggtaagcggcagggtcggaacaggagagcgcacgagggagcttccagggggaaacgcctggtatctttatagtcctgtcgggtttcgccacctctgacttgagcgtcgatttttgtgatgctcgtcaggggggcggagcctatggaaaaacgccagcaacgcggcctttttacggttcctggccttttgctggccttttgctcacatgttctttcctgcgttatcccctgattctgtggataaccgtattaccgcctttgagtgagctgataccgctcgccgcagccgaacgaccgagcgcagcgagtcagtgagcgaggaagcggaagagcgcccaatacgcaaaccgcctctccccgcgcgttggccgattcattaatgcagctggcacgacaggtttcccgactggaaagcgggcagtgagcgcaacgcaattaatgtgagttagctcactcattaggcaccccaggctttacactttatgcttccggctcgtatgttgtgtggaattgtgagcggataacaatttcacacaggaaacagcatatgcaaacaagcattactctgacatccaacgcatccggtacgtttgacggttactattacgaactctggaaggatactggcaatacaacaatgacggtctacactcaaggtcgcttttcctgccagtggtcgaacatcaataacgcgttgtttaggaccgggaagaaatacaaccagaattggcagtctcttggcacaatccggatcacgtactctgcgacttacaacccaaacgggaactcctacttgtgtatctatggctggtctaccaacccattggtcgagttctacatcgttgagtcctgggggaactggagaccgcctggtgcctgcgttactgcggatacatgggttatgactacggcggggccggctcaggtttcggagctgacggggcggtctttctcggctgtcgttgacggcaaggcctacgcggtgacatccgatgggttcttcaggactggccacaagccagtcctcgctctgaggaccagggagggccctgctctccgcctgacggctgaccatagggttcgcagggtggctaggaggaccaggtacacgctggaggctgagtggaccgaggctgggcagctgcagccaggcgacgagatcctcctgcacgatcatagggctctcggcgggtgggagggggctggcacacacgctgaggggtacctcctgggcctcctgatcggggacggcactctcaagtccgataaggctgtcattagcgtttgggctccagagctgaaggtggctggcgggggcgctgtcgcctacgcgcagaccggcgccgggggcatcgttcaggccgcggaggctgctgctgctacgctctcccacagggtcgacttccggggcttccagaggtcgatttctgggaggggcgaggctaggatggcttctggcgccgtgcggcacctggctcatgagatggggatgaggccaggccataagacaatcaccacggccatggagaaggcgtccagcgtcttcactgaggggctcctgaggggcctcttcgacgctgatgggagcgttcagggctcgcaggagaagggcgtgagcctcaggctgtcacagtccgatctctcgctcctgcagaccgctcagaggatgctcctgaggctgggcatcgcctccacgatctacccgaacaggcggctcgctcaggctaggccactgccagacggcagggggggcctgcgcgtctacgagacagcgtcacagcacgagctcgttatctccgctgataatctgaggatctacgccgagcggattgggttcgccgacacggataaggctgacaggctcgatcaggctctgggctcttacaaccggtcactcaatcgggagcgcttcacagtgactgtcgagtcgctgaccgaggagggctctgaggacgtgttcgatgttactgtggcggatattcatgctttcgatgctaacgggctctacgttcataacacgtccctgggccaagtgacaatcgatggcgggacctacgacatctataggacgacacgcgtcaaccagccttccattgtggggacagccacgttcgatcagtactggagcgtgcgcacctctaagcggacttcaggaacagtgaccgtgaccgatcacttccgcgcctgggcgaaccggggcctgaacctcggcacaatagaccaaattacattgtgcgtggagggttaccaaagctctggatcagccaacatcacccagaacaccttctctcagggctcttcttccggcagttcgggtggctcatccggctccacaacgactactcgcatcgagtgtgagaacatgtccttgtccggaccctacgttagcaggatcaccaatccctttaatggtattgcgctgtacgccaacggagacacagcccgcgctaccgttaacttccccgcaagtcgcaactacaatttccgcctgcggggttgcggcaacaacaataatcttgcccgtgtggacctgaggatcgacggacggaccgtcgggaccttttattaccagggcacatacccctgggaggccccaattgacaatgtttatgtcagtgcggggagtcatacagtcgaaatcactgttactgcggataacggcacatgggacgtgtatgccgactacctggtgatacagtgactcgagggggggcccggtacccaattcgccctatagtgagtcgtattacaattcactggccgtcgttttacaacgtcgtgactgggaaaaccctggcgttacccaacttaatcgccttgcagcacatccccctttcgccagctggcgtaatagcgaagaggcccgcaccgatcgcccttcccaacagttgcgcagcctgaatggcgaatggaaattgtaagcgttaatattttgttaaaattcgcgttaaatttttgttaaatcagctcattttttaaccaataggccgaaatcggcaaaatcccttataaatcaaaagaatagaccgagatagggttgagtgttgttccagtttggaacaagagtccactattaaagaacgtggactccaacgtcaaagggcgaaaaaccgtctatcagggcgatggcccactacgtgaaccatcaccctaatcaagttttttggggtcgaggtgccgtaaagcactaaatcggaaccctaaagggagcccccgatttagagcttgacggggaaagccggcgaacgtggcgagaaaggaagggaagaaagcgaaaggagcgggcgctagggcgctggcaagtgtagcggtcacgctgcgcgtaaccaccacacccgccgcgcttaatgcgccgctacagggcgcgtcaggtg

SEQ ID NO: 3271 - DNA, 4928 bp, Artificial Sequence
  Synthetic Construct, AT-114 intein modified protein encoding nucleic acids in pBluescript
gcacttttcggggaaatgtgcgcggaacccctatttgtttatttttctaaatacattcaaatatgtatccgctcatgagacaataaccctgataaatgcttcaataatattgaaaaaggaagagtatgagtattcaacatttccgtgtcgcccttattcccttttttgcggcattttgccttcctgtttttgctcacccagaaacgctggtgaaagtaaaagatgctgaagatcagttgggtgcacgagtgggttacatcgaactggatctcaacagcggtaagatccttgagagttttcgccccgaagaacgttttccaatgatgagcacttttaaagttctgctatgtggcgcggtattatcccgtattgacgccgggcaagagcaactcggtcgccgcatacactattctcagaatgacttggttgagtactcaccagtcacagaaaagcatcttacggatggcatgacagtaagagaattatgcagtgctgccataaccatgagtgataacactgcggccaacttacttctgacaacgatcggaggaccgaaggagctaaccgcttttttgcacaacatgggggatcatgtaactcgccttgatcgttgggaaccggagctgaatgaagccataccaaacgacgagcgtgacaccacgatgcctgtagcaatggcaacaacgttgcgcaaactattaactggcgaactacttactctagcttcccggcaacaattaatagactggatggaggcggataaagttgcaggaccacttctgcgctcggcccttccggctggctggtttattgctgataaatctggagccggtgagcgtgggtctcgcggtatcattgcagcactggggccagatggtaagccctcccgtatcgtagttatctacacgacggggagtcaggcaactatggatgaacgaaatagacagatcgctgagataggtgcctcactgattaagcattggtaactgtcagaccaagtttactcatatatactttagattgatttaaaacttcatttttaatttaaaaggatctaggtgaagatcctttttgataatctcatgaccaaaatcccttaacgtgagttttcgttccactgagcgtcagaccccgtagaaaagatcaaaggatcttcttgagatcctttttttctgcgcgtaatctgctgcttgcaaacaaaaaaaccaccgctaccagcggtggtttgtttgccggatcaagagctaccaactctttttccgaaggtaactggcttcagcagagcgcagataccaaatactgtccttctagtgtagccgtagttaggccaccacttcaagaactctgtagcaccgcctacatacctcgctctgctaatcctgttaccagtggctgctgccagtggcgataagtcgtgtcttaccgggttggactcaagacgatagttaccggataaggcgcagcggtcgggctgaacggggggttcgtgcacacagcccagcttggagcgaacgacctacaccgaactgagatacctacagcgtgagctatgagaaagcgccacgcttcccgaagggagaaaggcggacaggtatccggtaagcggcagggtcggaacaggagagcgcacgagggagcttccagggggaaacgcctggtatctttatagtcctgtcgggtttcgccacctctgacttgagcgtcgatttttgtgatgctcgtcaggggggcggagcctatggaaaaacgccagcaacgcggcctttttacggttcctggccttttgctggccttttgctcacatgttctttcctgcgttatcccctgattctgtggataaccgtattaccgcctttgagtgagctgataccgctcgccgcagccgaacgaccgagcgcagcgagtcagtgagcgaggaagcggaagagcgcccaatacgcaaaccgcctctccccgcgcgttggccgattcattaatgcagctggcacgacaggtttcccgactggaaagcgggcagtgagcgcaacgcaattaatgtgagttagctcactcattaggcaccccaggctttacactttatgcttccggctcgtatgttgtgtggaattgtgagcggataacaatttcacacaggaaacagcatatgcaaacaagcattactctgacatccaacgcatccggtacgtttgacggttactattacgaactctggaaggatactggcaatacaacaatgacggtctacactcaaggtcgcttttcctgccagtggtcgaacatcaataacgcgttgtttaggaccgggaagaaatacaaccagaattggcagtctcttggcacaatccggatcacgtactctgcgacttacaacccaaacgggaactcctacttgtgtatctatggctggtctaccaacccattggtcgagttctacatcgttgagtcctgggggaactggagaccgcctggtgccgcgggggttctctcgtcaaagattaagattcctgggggctggaagactatgggcaatattcgggtcggggatgaggtcgttacgccagacggcgggacagctaaggtcctcgctgttcacccacagggcgtgactaaggtggtcagggtccatttcaaggacggccggtacacagacgtctcgcccgatcacctctggaaggttcgcaggcaccattggtgcaacgataaggccatggcgaagctgactcgcgaggaggtggaggagagggtgtggagggtcatcaccacgaacgagctcaaggactacattggcctgagcacgaaggtttacgtgcagctcatcgagccggagaggaatgcggataagccattcaagattcacccttacgttctgggcgtgctcctgggcgacgggtgcatctcccagaaggctgtcgatattaccaagccataccagcagctcttcgacaaggtgcagagcctcctgcctgagcacctggagtgcgtctggaggccaaacaggaagggcgacggggagcccaagaccttcggcatccgcttcaaggatcggcgctccgagcagcacatcaattggcatattcgggacggcctgaaggagctcggcctgtacgggatgcgctcttggggcaaggtcatccccgaggagtacctccacgggtcagctaagcagaggctggagctcctgcagggcctcctggacaccgatgggacggttgataagcataagtcagtgtccttctccagctcgtctaagctcctgagcctcggcgtccagtacctcgttaggtcgctgggcgggatggctaggctgcaggagcgcacaccacactacactcataatggcgagaagagggaggggcggaccgactaccgggtctacatccgctacccgaggcccgaggagctcttcacgctggatcacaagagggagcgggcggtgtcccaccagcatacagagactctccgcctgcaggtcacccatatcgaggagaggcctgacgaggagacgcagtgcattactattgatcatccagatcatctctacattacggacgacttcatcgttactcacaacacgtccctgggccaagtgacaatcgatggcgggacctacgacatctataggacgacacgcgtcaaccagccttccattgtggggacagccacgttcgatcagtactggagcgtgcgcacctctaagcggacttcaggaacagtgaccgtgaccgatcacttccgcgcctgggcgaaccggggcctgaacctcggcacaatagaccaaattacattgtgcgtggagggttaccaaagctctggatcagccaacatcacccagaacaccttctctcagggctcttcttccggcagttcgggtggctcatccggctccacaacgactactcgcatcgagtgtgagaacatgtccttgtccggaccctacgttagcaggatcaccaatccctttaatggtattgcgctgtacgccaacggagacacagcccgcgctaccgttaacttccccgcaagtcgcaactacaatttccgcctgcggggttgcggcaacaacaataatcttgcccgtgtggacctgaggatcgacggacggaccgtcgggaccttttattaccagggcacatacccctgggaggccccaattgacaatgtttatgtcagtgcggggagtcatacagtcgaaatcactgttactgcggataacggcacatgggacgtgtatgccgactacctggtgatacagtgactcgagggggggcccggtacccaattcgccctatagtgagtcgtattacaattcactggccgtcgttttacaacgtcgtgactgggaaaaccctggcgttacccaacttaatcgccttgcagcacatccccctttcgccagctggcgtaatagcgaagaggcccgcaccgatcgcccttcccaacagttgcgcagcctgaatggcgaatggaaattgtaagcgttaatattttgttaaaattcgcgttaaatttttgttaaatcagctcattttttaaccaataggccgaaatcggcaaaatcccttataaatcaaaagaatagaccgagatagggttgagtgttgttccagtttggaacaagagtccactattaaagaacgtggactccaacgtcaaagggcgaaaaaccgtctatcagggcgatggcccactacgtgaaccatcaccctaatcaagttttttggggtcgaggtgccgtaaagcactaaatcggaaccctaaagggagcccccgatttagagcttgacggggaaagccggcgaacgtggcgagaaaggaagggaagaaagcgaaaggagcgggcgctagggcgctggcaagtgtagcggtcacgctgcgcgtaaccaccacacccgccgcgcttaatgcgccgctacagggcgcgtcaggtg

SEQ ID NO: 3272 - DNA, 5177 bp, Artificial Sequence
  Synthetic Construct, AT-115 intein modified protein encoding nucleic acids in pBluescript
gcacttttcggggaaatgtgcgcggaacccctatttgtttatttttctaaatacattcaaatatgtatccgctcatgagacaataaccctgataaatgcttcaataatattgaaaaaggaagagtatgagtattcaacatttccgtgtcgcccttattcccttttttgcggcattttgccttcctgtttttgctcacccagaaacgctggtgaaagtaaaagatgctgaagatcagttgggtgcacgagtgggttacatcgaactggatctcaacagcggtaagatccttgagagttttcgccccgaagaacgttttccaatgatgagcacttttaaagttctgctatgtggcgcggtattatcccgtattgacgccgggcaagagcaactcggtcgccgcatacactattctcagaatgacttggttgagtactcaccagtcacagaaaagcatcttacggatggcatgacagtaagagaattatgcagtgctgccataaccatgagtgataacactgcggccaacttacttctgacaacgatcggaggaccgaaggagctaaccgcttttttgcacaacatgggggatcatgtaactcgccttgatcgttgggaaccggagctgaatgaagccataccaaacgacgagcgtgacaccacgatgcctgtagcaatggcaacaacgttgcgcaaactattaactggcgaactacttactctagcttcccggcaacaattaatagactggatggaggcggataaagttgcaggaccacttctgcgctcggcccttccggctggctggtttattgctgataaatctggagccggtgagcgtgggtctcgcggtatcattgcagcactggggccagatggtaagccctcccgtatcgtagttatctacacgacggggagtcaggcaactatggatgaacgaaatagacagatcgctgagataggtgcctcactgattaagcattggtaactgtcagaccaagtttactcatatatactttagattgatttaaaacttcatttttaatttaaaaggatctaggtgaagatcctttttgataatctcatgaccaaaatcccttaacgtgagttttcgttccactgagcgtcagaccccgtagaaaagatcaaaggatcttcttgagatcctttttttctgcgcgtaatctgctgcttgcaaacaaaaaaaccaccgctaccagcggtggtttgtttgccggatcaagagctaccaactctttttccgaaggtaactggcttcagcagagcgcagataccaaatactgtccttctagtgtagccgtagttaggccaccacttcaagaactctgtagcaccgcctacatacctcgctctgctaatcctgttaccagtggctgctgccagtggcgataagtcgtgtcttaccgggttggactcaagacgatagttaccggataaggcgcagcggtcgggctgaacggggggttcgtgcacacagcccagcttggagcgaacgacctacaccgaactgagatacctacagcgtgagctatgagaaagcgccacgcttcccgaagggagaaaggcggacaggtatccggtaagcggcagggtcggaacaggagagcgcacgagggagcttccagggggaaacgcctggtatctttatagtcctgtcgggtttcgccacctctgacttgagcgtcgatttttgtgatgctcgtcaggggggcggagcctatggaaaaacgccagcaacgcggcctttttacggttcctggccttttgctggccttttgctcacatgttctttcctgcgttatcccctgattctgtggataaccgtattaccgcctttgagtgagctgataccgctcgccgcagccgaacgaccgagcgcagcgagtcagtgagcgaggaagcggaagagcgcccaatacgcaaaccgcctctccccgcgcgttggccgattcattaatgcagctggcacgacaggtttcccgactggaaagcgggcagtgagcgcaacgcaattaatgtgagttagctcactcattaggcaccccaggctttacactttatgcttccggctcgtatgttgtgtggaattgtgagcggataacaatttcacacaggaaacagcatatgcaaacaagcattactctgacatccaacgcatccggtacgtttgacggttactattacgaactctggaaggatactggcaatacaacaatgacggtctacactcaaggtcgcttttcctgccagtggtcgaacatcaataacgcgttgtttaggaccgggaagaaatacaaccagaattggcagtctcttggcacaatccggatcacgtactctgcgacttacaacccaaacgggaactcctacttgtgtatctatggctggtctaccaacccattggtcgagttctacatcgttgagtcctgggggaactggagaccgcctggtgcctgcttcgctaaggggacaaaggttctcatggctaacggggatgacaagaatattgaggacatcgcggtcggggaggaggttctcgggaaggacggcctcccacgcgaggtggtcgctctgcctcgggggagggagacaatgtacgaggtcagcgagaagactcagcacagggcggagaccgttttcggcacggcctcgtacacatgcaacgcgactcacaagctcgtgctgcagaccaatcagagggttaacatcacgaatcatgtgctccggggcgagtctcagacctcagttacgtacttccagatgaagaccgctgtggctgacgggagggagattgagctcccaaagctgtgcacgaagtccttccagcactccagccatggccgggagaacgcttggaagaaggccgaggtcttcgcgtccacaatcagccgcgaccccattgattggactgcggaggctcgcgacatctctaggctcggctaccacgtgcgcagggctaccaggcagctctggagcccagttctggtggagaaggaggtcctggctcctatgatcgccaagcggggcttcgatgagtccattgcgccgtacatggcttacctcgtggggctgtgggtcggcgacgggtactccgatagggccacattcagcatcgacattcaggatgtggagatccacgagaggattaaggacttcgcctcacatgctggcctgactccaaggatcgcttgctacaagaagtccagggatgctaccatttcactccacaactccgagacgcggggcaagaatgtccgccagaacctgaatacggggaacctcctgtggtcgctcctggctgagatctgcggcaagaaggagaatgagatgctcttcaagctggtgccaagcttcctccgctcagagtccatcgcggtccgggagtacttcatttctggcctggtcgactcagatgggcacgttaagcgcgacgaggctgataagtgctacagcgccacagtgaagactatctaccctgccgtccgggacggcctcgtcagcgttgcgcgctcgctggggattcagacaagcgtgtcggtcgaggaggccaaggaggtcaactcggttaagcatcaggagtcttacgccatctacatggccaactcctccgctctcgactcggtgctgtctaagtgcgctgctccaaggaagcgggctgaggagcccgtttgcgtgaacagggagccgcacccctacacgttccacatggtcgagaaggaggaggacgatttctacggcatcactctctcagaggactcggatcatcagttcctgctctctaatctcgctctcgttcataatacgtccctgggccaagtgacaatcgatggcgggacctacgacatctataggacgacacgcgtcaaccagccttccattgtggggacagccacgttcgatcagtactggagcgtgcgcacctctaagcggacttcaggaacagtgaccgtgaccgatcacttccgcgcctgggcgaaccggggcctgaacctcggcacaatagaccaaattacattgtgcgtggagggttaccaaagctctggatcagccaacatcacccagaacaccttctctcagggctcttcttccggcagttcgggtggctcatccggctccacaacgactactcgcatcgagtgtgagaacatgtccttgtccggaccctacgttagcaggatcaccaatccctttaatggtattgcgctgtacgccaacggagacacagcccgcgctaccgttaacttccccgcaagtcgcaactacaatttccgcctgcggggttgcggcaacaacaataatcttgcccgtgtggacctgaggatcgacggacggaccgtcgggaccttttattaccagggcacatacccctgggaggccccaattgacaatgtttatgtcagtgcggggagtcatacagtcgaaatcactgttactgcggataacggcacatgggacgtgtatgccgactacctggtgatacagtgactcgagggggggcccggtacccaattcgccctatagtgagtcgtattacaattcactggccgtcgttttacaacgtcgtgactgggaaaaccctggcgttacccaacttaatcgccttgcagcacatccccctttcgccagctggcgtaatagcgaagaggcccgcaccgatcgcccttcccaacagttgcgcagcctgaatggcgaatggaaattgtaagcgttaatattttgttaaaattcgcgttaaatttttgttaaatcagctcattttttaaccaataggccgaaatcggcaaaatcccttataaatcaaaagaatagaccgagatagggttgagtgttgttccagtttggaacaagagtccactattaaagaacgtggactccaacgtcaaagggcgaaaaaccgtctatcagggcgatggcccactacgtgaaccatcaccctaatcaagttttttggggtcgaggtgccgtaaagcactaaatcggaaccctaaagggagcccccgatttagagcttgacggggaaagccggcgaacgtggcgagaaaggaagggaagaaagcgaaaggagcgggcgctagggcgctggcaagtgtagcggtcacgctgcgcgtaaccaccacacccgccgcgcttaatgcgccgctacagggcgcgtcaggtg

SEQ ID NO: 3273 - DNA, 5114 bp, Artificial Sequence
  Synthetic Construct, AT-116 intein modified protein encoding nucleic acids in pBluescript
gcacttttcggggaaatgtgcgcggaacccctatttgtttatttttctaaatacattcaaatatgtatccgctcatgagacaataaccctgataaatgcttcaataatattgaaaaaggaagagtatgagtattcaacatttccgtgtcgcccttattcccttttttgcggcattttgccttcctgtttttgctcacccagaaacgctggtgaaagtaaaagatgctgaagatcagttgggtgcacgagtgggttacatcgaactggatctcaacagcggtaagatccttgagagttttcgccccgaagaacgttttccaatgatgagcacttttaaagttctgctatgtggcgcggtattatcccgtattgacgccgggcaagagcaactcggtcgccgcatacactattctcagaatgacttggttgagtactcaccagtcacagaaaagcatcttacggatggcatgacagtaagagaattatgcagtgctgccataaccatgagtgataacactgcggccaacttacttctgacaacgatcggaggaccgaaggagctaaccgcttttttgcacaacatgggggatcatgtaactcgccttgatcgttgggaaccggagctgaatgaagccataccaaacgacgagcgtgacaccacgatgcctgtagcaatggcaacaacgttgcgcaaactattaactggcgaactacttactctagcttcccggcaacaattaatagactggatggaggcggataaagttgcaggaccacttctgcgctcggcccttccggctggctggtttattgctgataaatctggagccggtgagcgtgggtctcgcggtatcattgcagcactggggccagatggtaagccctcccgtatcgtagttatctacacgacggggagtcaggcaactatggatgaacgaaatagacagatcgctgagataggtgcctcactgattaagcattggtaactgtcagaccaagtttactcatatatactttagattgatttaaaacttcatttttaatttaaaaggatctaggtgaagatcctttttgataatctcatgaccaaaatcccttaacgtgagttttcgttccactgagcgtcagaccccgtagaaaagatcaaaggatcttcttgagatcctttttttctgcgcgtaatctgctgcttgcaaacaaaaaaaccaccgctaccagcggtggtttgtttgccggatcaagagctaccaactctttttccgaaggtaactggcttcagcagagcgcagataccaaatactgtccttctagtgtagccgtagttaggccaccacttcaagaactctgtagcaccgcctacatacctcgctctgctaatcctgttaccagtggctgctgccagtggcgataagtcgtgtcttaccgggttggactcaagacgatagttaccggataaggcgcagcggtcgggctgaacggggggttcgtgcacacagcccagcttggagcgaacgacctacaccgaactgagatacctacagcgtgagctatgagaaagcgccacgcttcccgaagggagaaaggcggacaggtatccggtaagcggcagggtcggaacaggagagcgcacgagggagcttccagggggaaacgcctggtatctttatagtcctgtcgggtttcgccacctctgacttgagcgtcgatttttgtgatgctcgtcaggggggcggagcctatggaaaaacgccagcaacgcggcctttttacggttcctggccttttgctggccttttgctcacatgttctttcctgcgttatcccctgattctgtggataaccgtattaccgcctttgagtgagctgataccgctcgccgcagccgaacgaccgagcgcagcgagtcagtgagcgaggaagcggaagagcgcccaatacgcaaaccgcctctccccgcgcgttggccgattcattaatgcagctggcacgacaggtttcccgactggaaagcgggcagtgagcgcaacgcaattaatgtgagttagctcactcattaggcaccccaggctttacactttatgcttccggctcgtatgttgtgtggaattgtgagcggataacaatttcacacaggaaacagcatatgcaaacaagcattactctgacatccaacgcatccggtacgtttgacggttactattacgaactctggaaggatactggcaatacaacaatgacggtctacactcaaggtcgcttttcctgccagtggtcgaacatcaataacgcgttgtttaggaccgggaagaaatacaaccagaattggcagtctcttggcacaatccggatcacgtactctgcgacttacaacccaaacgggaactcctacttgtgtatctatggctggtctaccaacccattggtcgagttctacatcgttgagtcctgggggaactggagaccgcctggtgcctgcctcgcgggggacactctcattacactggctgacgggcggcgggttcctattcgggagctggtctcgcagcagaatttctcggtctgggcgctgaacccgcagacgtacaggctggagagggctcgggtctcccgggccttctgcacaggcatcaagcccgtttacaggctgaccacgaggctcgggaggagcattagggctactgctaatcaccgcttcctgaccccacagggctggaagagggtggacgagctccagcctggggattacctggctctcccaaggaggatccccacggccagcacaccaactctgaccgaggctgagctcgctctcctgggccacctgatcggcgacgggtgcactctccctcaccatgtgattcagtacacctctagggacgctgatctggctacgctcgtcgctcatctggccacaaaggtcttcggctcaaaggttaccccgcagatccgcaaggagctcaggtggtaccaggtgtacctgagggctgctaggccactcgctcctggcaagcgcaacccgatcagcgactggctgagggatctcggcattttcgggctgcggtcgtacgagaagaaggtccccgcgctcctgttctgccagacgtccgaggccatcgcgacattcctgaggcacctctgggctactgacggctgcattcagatgaggagggggaagaagccatacccagctgtgtactacgcgacctccagctaccagctcgcgagggatgtccagtcgctcctgctccgcctgggcatcaacgccaggctcaagaccgttgctcagggcgagaaggggagggtgcagtaccatgtgaaggtctccggcagggaggacctgctcaggttcgtggagaagattggcgctgtcggggctaggcagagggctgctctggcctcggtttacgactacctctctgtgcggacgggcaacccaaatcgcgatatcattcctgtggctctgtggtacgagctcgtccgcgaggccatgtaccagaggggcatctcgcaccggcagctgcatgcgaacctcgggatggcttacggcgggatgacactgttccggcagaatctctctcgggctcgcgccctgaggctcgctgaggctgctgcctgcccagagctgaggcagctcgctcagtcagacgtctactgggatccgatcgtttccattgagcccgacggcgttgaggaggtgttcgatctcactgttccagggccacataacttcgttgctaatgacatcattgctcataatacgtccctgggccaagtgacaatcgatggcgggacctacgacatctataggacgacacgcgtcaaccagccttccattgtggggacagccacgttcgatcagtactggagcgtgcgcacctctaagcggacttcaggaacagtgaccgtgaccgatcacttccgcgcctgggcgaaccggggcctgaacctcggcacaatagaccaaattacattgtgcgtggagggttaccaaagctctggatcagccaacatcacccagaacaccttctctcagggctcttcttccggcagttcgggtggctcatccggctccacaacgactactcgcatcgagtgtgagaacatgtccttgtccggaccctacgttagcaggatcaccaatccctttaatggtattgcgctgtacgccaacggagacacagcccgcgctaccgttaacttccccgcaagtcgcaactacaatttccgcctgcggggttgcggcaacaacaataatcttgcccgtgtggacctgaggatcgacggacggaccgtcgggaccttttattaccagggcacatacccctgggaggccccaattgacaatgtttatgtcagtgcggggagtcatacagtcgaaatcactgttactgcggataacggcacatgggacgtgtatgccgactacctggtgatacagtgactcgagggggggcccggtacccaattcgccctatagtgagtcgtattacaattcactggccgtcgttttacaacgtcgtgactgggaaaaccctggcgttacccaacttaatcgccttgcagcacatccccctttcgccagctggcgtaatagcgaagaggcccgcaccgatcgcccttcccaacagttgcgcagcctgaatggcgaatggaaattgtaagcgttaatattttgttaaaattcgcgttaaatttttgttaaatcagctcattttttaaccaataggccgaaatcggcaaaatcccttataaatcaaaagaatagaccgagatagggttgagtgttgttccagtttggaacaagagtccactattaaagaacgtggactccaacgtcaaagggcgaaaaaccgtctatcagggcgatggcccactacgtgaaccatcaccctaatcaagttttttggggtcgaggtgccgtaaagcactaaatcggaaccctaaagggagcccccgatttagagcttgacggggaaagccggcgaacgtggcgagaaaggaagggaagaaagcgaaaggagcgggcgctagggcgctggcaagtgtagcggtcacgctgcgcgtaaccaccacacccgccgcgcttaatgcgccgctacagggcgcgtcaggtg

SEQ ID NO: 3274 - DNA, 4946 bp, Artificial Sequence
  Synthetic Construct, AT-117 intein modified protein encoding nucleic acids in pBluescript
gcacttttcggggaaatgtgcgcggaacccctatttgtttatttttctaaatacattcaaatatgtatccgctcatgagacaataaccctgataaatgcttcaataatattgaaaaaggaagagtatgagtattcaacatttccgtgtcgcccttattcccttttttgcggcattttgccttcctgtttttgctcacccagaaacgctggtgaaagtaaaagatgctgaagatcagttgggtgcacgagtgggttacatcgaactggatctcaacagcggtaagatccttgagagttttcgccccgaagaacgttttccaatgatgagcacttttaaagttctgctatgtggcgcggtattatcccgtattgacgccgggcaagagcaactcggtcgccgcatacactattctcagaatgacttggttgagtactcaccagtcacagaaaagcatcttacggatggcatgacagtaagagaattatgcagtgctgccataaccatgagtgataacactgcggccaacttacttctgacaacgatcggaggaccgaaggagctaaccgcttttttgcacaacatgggggatcatgtaactcgccttgatcgttgggaaccggagctgaatgaagccataccaaacgacgagcgtgacaccacgatgcctgtagcaatggcaacaacgttgcgcaaactattaactggcgaactacttactctagcttcccggcaacaattaatagactggatggaggcggataaagttgcaggaccacttctgcgctcggcccttccggctggctggtttattgctgataaatctggagccggtgagcgtgggtctcgcggtatcattgcagcactggggccagatggtaagccctcccgtatcgtagttatctacacgacggggagtcaggcaactatggatgaacgaaatagacagatcgctgagataggtgcctcactgattaagcattggtaactgtcagaccaagtttactcatatatactttagattgatttaaaacttcatttttaatttaaaaggatctaggtgaagatcctttttgataatctcatgaccaaaatcccttaacgtgagttttcgttccactgagcgtcagaccccgtagaaaagatcaaaggatcttcttgagatcctttttttctgcgcgtaatctgctgcttgcaaacaaaaaaaccaccgctaccagcggtggtttgtttgccggatcaagagctaccaactctttttccgaaggtaactggcttcagcagagcgcagataccaaatactgtccttctagtgtagccgtagttaggccaccacttcaagaactctgtagcaccgcctacatacctcgctctgctaatcctgttaccagtggctgctgccagtggcgataagtcgtgtcttaccgggttggactcaagacgatagttaccggataaggcgcagcggtcgggctgaacggggggttcgtgcacacagcccagcttggagcgaacgacctacaccgaactgagatacctacagcgtgagctatgagaaagcgccacgcttcccgaagggagaaaggcggacaggtatccggtaagcggcagggtcggaacaggagagcgcacgagggagcttccagggggaaacgcctggtatctttatagtcctgtcgggtttcgccacctctgacttgagcgtcgatttttgtgatgctcgtcaggggggcggagcctatggaaaaacgccagcaacgcggcctttttacggttcctggccttttgctggccttttgctcacatgttctttcctgcgttatcccctgattctgtggataaccgtattaccgcctttgagtgagctgataccgctcgccgcagccgaacgaccgagcgcagcgagtcagtgagcgaggaagcggaagagcgcccaatacgcaaaccgcctctccccgcgcgttggccgattcattaatgcagctggcacgacaggtttcccgactggaaagcgggcagtgagcgcaacgcaattaatgtgagttagctcactcattaggcaccccaggctttacactttatgcttccggctcgtatgttgtgtggaattgtgagcggataacaatttcacacaggaaacagcatatgcaaacaagcattactctgacatccaacgcatccggtacgtttgacggttactattacgaactctggaaggatactggcaatacaacaatgacggtctacactcaaggtcgcttttcctgccagtggtcgaacatcaataacgcgttgtttaggaccgggaagaaatacaaccagaattggcagtctcttggcacaatccggatcacgtactctgcgacttacaacccaaacgggaactcctacttgtgtatctatggctggtctaccaacccattggtcgagttctacatcgttgagtcctgggggaactggagaccgcctggtgcctgcgttacggcggagacatgggttatgacggatgagggggctaggcaggtctcggctctgctggatcggcctttcagggcggtcgtgaacggcatcgcctacgattcaggcgagcacgggttcttctgcaccggcctcaagccagtgaagaggctgtccaccgcttgcgggaggcacctcaggctgacggctgaccatctggtccggaaggtggtcggcaagacgaggtggaggcaggaggttgagtgggtgccagctggcgacctcaggcctggggatgaggtgaagctgcacgaccatcgcaccgcgatgattcagacgaggcctgaggatgagaggggctacctcctggggctcctgatcggcgacggggttattcgcgacgataagacactcatctccgtgtggccacaggaggagtgcattggcgctcagccactggggcaccccgtcatgcataaggttgaggctctcctgagggacctcccacacagggctgatttcgctggctggcagaaggtcgagggcaggggggagtacaggatcggcacagctgctctcactgctctggctgctgagtacggcctcacacgcgggaggaagaccatcacgccggagattgagggcgctgagactgctggcttcggggctgctgtcctcaggggcctgttcgacgctgatggcagcgttcagggggctcaggagaagggcgtgtccgtcaggctcgctcagagcgacctggctctcctgcaggctgctcagaggatgctcgctaggctgggcatgaacgctgtgatctacgagaatcgcagggaggcgggcagggctttcctgccagacgggaagggcgggcaggctcacttcgagaccaaggcgcagcatgagctcgtcatctcgggcgagaacctggcgacataccaggagcggattgggttcactgatgtggctaaggctaggaggctcgctgtcgctctgtcgggctacaagagggccctcaatcgggagcgcttctctgccgttgtggcggacgtcgttgacgatggcatggcggaggtgttcgatgttcaggttccaggggttaatgctttcgatgctaatggcttctacgttcacaacacgtccctgggccaagtgacaatcgatggcgggacctacgacatctataggacgacacgcgtcaaccagccttccattgtggggacagccacgttcgatcagtactggagcgtgcgcacctctaagcggacttcaggaacagtgaccgtgaccgatcacttccgcgcctgggcgaaccggggcctgaacctcggcacaatagaccaaattacattgtgcgtggagggttaccaaagctctggatcagccaacatcacccagaacaccttctctcagggctcttcttccggcagttcgggtggctcatccggctccacaacgactactcgcatcgagtgtgagaacatgtccttgtccggaccctacgttagcaggatcaccaatccctttaatggtattgcgctgtacgccaacggagacacagcccgcgctaccgttaacttccccgcaagtcgcaactacaatttccgcctgcggggttgcggcaacaacaataatcttgcccgtgtggacctgaggatcgacggacggaccgtcgggaccttttattaccagggcacatacccctgggaggccccaattgacaatgtttatgtcagtgcggggagtcatacagtcgaaatcactgttactgcggataacggcacatgggacgtgtatgccgactacctggtgatacagtgactcgagggggggcccggtacccaattcgccctatagtgagtcgtattacaattcactggccgtcgttttacaacgtcgtgactgggaaaaccctggcgttacccaacttaatcgccttgcagcacatccccctttcgccagctggcgtaatagcgaagaggcccgcaccgatcgcccttcccaacagttgcgcagcctgaatggcgaatggaaattgtaagcgttaatattttgttaaaattcgcgttaaatttttgttaaatcagctcattttttaaccaataggccgaaatcggcaaaatcccttataaatcaaaagaatagaccgagatagggttgagtgttgttccagtttggaacaagagtccactattaaagaacgtggactccaacgtcaaagggcgaaaaaccgtctatcagggcgatggcccactacgtgaaccatcaccctaatcaagttttttggggtcgaggtgccgtaaagcactaaatcggaaccctaaagggagcccccgatttagagcttgacggggaaagccggcgaacgtggcgagaaaggaagggaagaaagcgaaaggagcgggcgctagggcgctggcaagtgtagcggtcacgctgcgcgtaaccaccacacccgccgcgcttaatgcgccgctacagggcgcgtcaggtg

SEQ ID NO: 3275 - DNA, 4874 bp, Artificial Sequence
  Synthetic Construct, AT-118 intein modified protein encoding nucleic acids in pBluescript
gcacttttcggggaaatgtgcgcggaacccctatttgtttatttttctaaatacattcaaatatgtatccgctcatgagacaataaccctgataaatgcttcaataatattgaaaaaggaagagtatgagtattcaacatttccgtgtcgcccttattcccttttttgcggcattttgccttcctgtttttgctcacccagaaacgctggtgaaagtaaaagatgctgaagatcagttgggtgcacgagtgggttacatcgaactggatctcaacagcggtaagatccttgagagttttcgccccgaagaacgttttccaatgatgagcacttttaaagttctgctatgtggcgcggtattatcccgtattgacgccgggcaagagcaactcggtcgccgcatacactattctcagaatgacttggttgagtactcaccagtcacagaaaagcatcttacggatggcatgacagtaagagaattatgcagtgctgccataaccatgagtgataacactgcggccaacttacttctgacaacgatcggaggaccgaaggagctaaccgcttttttgcacaacatgggggatcatgtaactcgccttgatcgttgggaaccggagctgaatgaagccataccaaacgacgagcgtgacaccacgatgcctgtagcaatggcaacaacgttgcgcaaactattaactggcgaactacttactctagcttcccggcaacaattaatagactggatggaggcggataaagttgcaggaccacttctgcgctcggcccttccggctggctggtttattgctgataaatctggagccggtgagcgtgggtctcgcggtatcattgcagcactggggccagatggtaagccctcccgtatcgtagttatctacacgacggggagtcaggcaactatggatgaacgaaatagacagatcgctgagataggtgcctcactgattaagcattggtaactgtcagaccaagtttactcatatatactttagattgatttaaaacttcatttttaatttaaaaggatctaggtgaagatcctttttgataatctcatgaccaaaatcccttaacgtgagttttcgttccactgagcgtcagaccccgtagaaaagatcaaaggatcttcttgagatcctttttttctgcgcgtaatctgctgcttgcaaacaaaaaaaccaccgctaccagcggtggtttgtttgccggatcaagagctaccaactctttttccgaaggtaactggcttcagcagagcgcagataccaaatactgtccttctagtgtagccgtagttaggccaccacttcaagaactctgtagcaccgcctacatacctcgctctgctaatcctgttaccagtggctgctgccagtggcgataagtcgtgtcttaccgggttggactcaagacgatagttaccggataaggcgcagcggtcgggctgaacggggggttcgtgcacacagcccagcttggagcgaacgacctacaccgaactgagatacctacagcgtgagctatgagaaagcgccacgcttcccgaagggagaaaggcggacaggtatccggtaagcggcagggtcggaacaggagagcgcacgagggagcttccagggggaaacgcctggtatctttatagtcctgtcgggtttcgccacctctgacttgagcgtcgatttttgtgatgctcgtcaggggggcggagcctatggaaaaacgccagcaacgcggcctttttacggttcctggccttttgctggccttttgctcacatgttctttcctgcgttatcccctgattctgtggataaccgtattaccgcctttgagtgagctgataccgctcgccgcagccgaacgaccgagcgcagcgagtcagtgagcgaggaagcggaagagcgcccaatacgcaaaccgcctctccccgcgcgttggccgattcattaatgcagctggcacgacaggtttcccgactggaaagcgggcagtgagcgcaacgcaattaatgtgagttagctcactcattaggcaccccaggctttacactttatgcttccggctcgtatgttgtgtggaattgtgagcggataacaatttcacacaggaaacagcatatgcaaacaagcattactctgacatccaacgcatccggtacgtttgacggttactattacgaactctggaaggatactggcaatacaacaatgacggtctacactcaaggtcgcttttcctgccagtggtcgaacatcaataacgcgttgtttaggaccgggaagaaatacaaccagaattggcagtctcttggcacaatccggatcacgtactctgcgacttacaacccaaacgggaactcctacttgtgtatctatggctggtctaccaacccattggtcgagttctacatcgttgagtcctgggggaactggagaccgcctggtgcctgcctcaagcgggggacagaggtcattatgttcgatgggacaactaagaaggtggaggacgttatcgtgggggacgttctcatggggccagacagcacccctaggaacgtgctctcgctgggcagggggagggagatgatgtacgaggtgaagccacggaagggcgagtcctacacggtcaatgagtcacacatcctctccctgcgcaccacgacaggcattgcgaaggggtcctggcctgacaacacagtcttcgatatcagcgttcgggactggctcaagctgccaaagtatgtgactggccctaatgggtacctcaagggctggagggtgccagtcgatttcccaaggaaggagcaggacgaggctctcctgccaccatacctgatgggcctctggctgggcgacgggacttccagctcgggcgctatcacctcgggggagaatgagaaggagattagggcttacctggagtcttacgctgctaggaacggcatgcagatcaggaaggaggggctgacttggtctatttcacacggcaacaccgggcacaagaagcatggcttcacgcatgcgctcaagagcgctggggtgctgaacaataagcacatcccgcataactacaagtgcggcgataggaggcagaggctggagctcctggctggcctcctggactctgatgggtactgcgatctctcaaaggctggcttcgactggatttccgttagcgagaggctggccgacgatttctgctacctctgccggtcgctgggcttcgctgcctacaagaagaagacctgcaagcgctgcgcgaacacagacgtctggggcgattacttcagggtttcggtgtctggggacttctccgaggtgccattcgtcaggggcaggcatcagaatctccccaagcgcaacatcaataagaacgttctgaacgtgggcatcgagtccattacccccgtcggcgttgacgattacttcgggttcacaattgatggggattcaaggttcctcctcggggatttcacagttactcataataccacgtccctgggccaagtgacaatcgatggcgggacctacgacatctataggacgacacgcgtcaaccagccttccattgtggggacagccacgttcgatcagtactggagcgtgcgcacctctaagcggacttcaggaacagtgaccgtgaccgatcacttccgcgcctgggcgaaccggggcctgaacctcggcacaatagaccaaattacattgtgcgtggagggttaccaaagctctggatcagccaacatcacccagaacaccttctctcagggctcttcttccggcagttcgggtggctcatccggctccacaacgactactcgcatcgagtgtgagaacatgtccttgtccggaccctacgttagcaggatcaccaatccctttaatggtattgcgctgtacgccaacggagacacagcccgcgctaccgttaacttccccgcaagtcgcaactacaatttccgcctgcggggttgcggcaacaacaataatcttgcccgtgtggacctgaggatcgacggacggaccgtcgggaccttttattaccagggcacatacccctgggaggccccaattgacaatgtttatgtcagtgcggggagtcatacagtcgaaatcactgttactgcggataacggcacatgggacgtgtatgccgactacctggtgatacagtgactcgagggggggcccggtacccaattcgccctatagtgagtcgtattacaattcactggccgtcgttttacaacgtcgtgactgggaaaaccctggcgttacccaacttaatcgccttgcagcacatccccctttcgccagctggcgtaatagcgaagaggcccgcaccgatcgcccttcccaacagttgcgcagcctgaatggcgaatggaaattgtaagcgttaatattttgttaaaattcgcgttaaatttttgttaaatcagctcattttttaaccaataggccgaaatcggcaaaatcccttataaatcaaaagaatagaccgagatagggttgagtgttgttccagtttggaacaagagtccactattaaagaacgtggactccaacgtcaaagggcgaaaaaccgtctatcagggcgatggcccactacgtgaaccatcaccctaatcaagttttttggggtcgaggtgccgtaaagcactaaatcggaaccctaaagggagcccccgatttagagcttgacggggaaagccggcgaacgtggcgagaaaggaagggaagaaagcgaaaggagcgggcgctagggcgctggcaagtgtagcggtcacgctgcgcgtaaccaccacacccgccgcgcttaatgcgccgctacagggcgcgtcaggtg

SEQ ID NO: 3276 - DNA, 4844 bp, Artificial Sequence
  Synthetic Construct, AT-119 intein modified protein encoding nucleic acids in pBluescript
gcacttttcggggaaatgtgcgcggaacccctatttgtttatttttctaaatacattcaaatatgtatccgctcatgagacaataaccctgataaatgcttcaataatattgaaaaaggaagagtatgagtattcaacatttccgtgtcgcccttattcccttttttgcggcattttgccttcctgtttttgctcacccagaaacgctggtgaaagtaaaagatgctgaagatcagttgggtgcacgagtgggttacatcgaactggatctcaacagcggtaagatccttgagagttttcgccccgaagaacgttttccaatgatgagcacttttaaagttctgctatgtggcgcggtattatcccgtattgacgccgggcaagagcaactcggtcgccgcatacactattctcagaatgacttggttgagtactcaccagtcacagaaaagcatcttacggatggcatgacagtaagagaattatgcagtgctgccataaccatgagtgataacactgcggccaacttacttctgacaacgatcggaggaccgaaggagctaaccgcttttttgcacaacatgggggatcatgtaactcgccttgatcgttgggaaccggagctgaatgaagccataccaaacgacgagcgtgacaccacgatgcctgtagcaatggcaacaacgttgcgcaaactattaactggcgaactacttactctagcttcccggcaacaattaatagactggatggaggcggataaagttgcaggaccacttctgcgctcggcccttccggctggctggtttattgctgataaatctggagccggtgagcgtgggtctcgcggtatcattgcagcactggggccagatggtaagccctcccgtatcgtagttatctacacgacggggagtcaggcaactatggatgaacgaaatagacagatcgctgagataggtgcctcactgattaagcattggtaactgtcagaccaagtttactcatatatactttagattgatttaaaacttcatttttaatttaaaaggatctaggtgaagatcctttttgataatctcatgaccaaaatcccttaacgtgagttttcgttccactgagcgtcagaccccgtagaaaagatcaaaggatcttcttgagatcctttttttctgcgcgtaatctgctgcttgcaaacaaaaaaaccaccgctaccagcggtggtttgtttgccggatcaagagctaccaactctttttccgaaggtaactggcttcagcagagcgcagataccaaatactgtccttctagtgtagccgtagttaggccaccacttcaagaactctgtagcaccgcctacatacctcgctctgctaatcctgttaccagtggctgctgccagtggcgataagtcgtgtcttaccgggttggactcaagacgatagttaccggataaggcgcagcggtcgggctgaacggggggttcgtgcacacagcccagcttggagcgaacgacctacaccgaactgagatacctacagcgtgagctatgagaaagcgccacgcttcccgaagggagaaaggcggacaggtatccggtaagcggcagggtcggaacaggagagcgcacgagggagcttccagggggaaacgcctggtatctttatagtcctgtcgggtttcgccacctctgacttgagcgtcgatttttgtgatgctcgtcaggggggcggagcctatggaaaaacgccagcaacgcggcctttttacggttcctggccttttgctggccttttgctcacatgttctttcctgcgttatcccctgattctgtggataaccgtattaccgcctttgagtgagctgataccgctcgccgcagccgaacgaccgagcgcagcgagtcagtgagcgaggaagcggaagagcgcccaatacgcaaaccgcctctccccgcgcgttggccgattcattaatgcagctggcacgacaggtttcccgactggaaagcgggcagtgagcgcaacgcaattaatgtgagttagctcactcattaggcaccccaggctttacactttatgcttccggctcgtatgttgtgtggaattgtgagcggataacaatttcacacaggaaacagcatatgcaaacaagcattactctgacatccaacgcatccggtacgtttgacggttactattacgaactctggaaggatactggcaatacaacaatgacggtctacactcaaggtcgcttttcctgccagtggtcgaacatcaataacgcgttgtttaggaccgggaagaaatacaaccagaattggcagtctcttggcacaatccggatcacgtactctgcgacttacaacccaaacgggaactcctacttgtgtatctatggctggtctaccaacccattggtcgagttctacatcgttgagtcctgggggaactggagaccgcctggtgccgctcagccgctggattcgctcgttctcgcgcctacggggttccgccgcatgggggatctcagggagggggatgaggtcgtggtccctaacggcgagatcgcgctgattgacggggtcttcccacagggcgtcagggacgtttggcggatcgtgctgagcgatggctccagcgtcgagtgcgacgatgagcacctctggattgtcggcacatcgtgcgggtggcataggggccagactccgaaggtcatgaccacgcgcgagatcaggctcgacacattcaaggccaacggctcctccaagtggtatgtgccagctgctaccccagtcgacctggggccagatgttggcctgccactcgacccttacctcttcggcctcctgctcggcgatgggtccttccgccacaatctgaggctcagcaccgtcgacgatgagatcagggacgctgctgctgatgctgtggctccggactgccggctggtgcccgtcaccggctcgcgctgcgattacacgatccagctcaagcagcggtctggcggggttcgcaacccagtgattcaggctctgaggaggctggacctctgggggaagacctcccacggcaagttcatccctgaggatttcaagaacacgtctattaagaataggctgtcactgctccaggggctgctcgacacagatggcactgttcatgccgacgggatgtcagtgtccctcaggagcgcttcgctgaggctcgctgaggacgtcgcttggctggttcgctctctcggcgggagggctcgggtcctcccagagaaggctgccttccatgtttcagtggctctgccagacgagtacgctcctttccggctctcccgcaaggctgatcgcgtgaggccaaggcccaagtacaatacgttccggaggggcatccgcgctgtggagtatgtgggcaggaagccggctcagtgcatttctgttgggcatccttcacatgcttacgttacggataatttcactgttactcataatacgtccctgggccaagtgacaatcgatggcgggacctacgacatctataggacgacacgcgtcaaccagccttccattgtggggacagccacgttcgatcagtactggagcgtgcgcacctctaagcggacttcaggaacagtgaccgtgaccgatcacttccgcgcctgggcgaaccggggcctgaacctcggcacaatagaccaaattacattgtgcgtggagggttaccaaagctctggatcagccaacatcacccagaacaccttctctcagggctcttcttccggcagttcgggtggctcatccggctccacaacgactactcgcatcgagtgtgagaacatgtccttgtccggaccctacgttagcaggatcaccaatccctttaatggtattgcgctgtacgccaacggagacacagcccgcgctaccgttaacttccccgcaagtcgcaactacaatttccgcctgcggggttgcggcaacaacaataatcttgcccgtgtggacctgaggatcgacggacggaccgtcgggaccttttattaccagggcacatacccctgggaggccccaattgacaatgtttatgtcagtgcggggagtcatacagtcgaaatcactgttactgcggataacggcacatgggacgtgtatgccgactacctggtgatacagtgactcgagggggggcccggtacccaattcgccctatagtgagtcgtattacaattcactggccgtcgttttacaacgtcgtgactgggaaaaccctggcgttacccaacttaatcgccttgcagcacatccccctttcgccagctggcgtaatagcgaagaggcccgcaccgatcgcccttcccaacagttgcgcagcctgaatggcgaatggaaattgtaagcgttaatattttgttaaaattcgcgttaaatttttgttaaatcagctcattttttaaccaataggccgaaatcggcaaaatcccttataaatcaaaagaatagaccgagatagggttgagtgttgttccagtttggaacaagagtccactattaaagaacgtggactccaacgtcaaagggcgaaaaaccgtctatcagggcgatggcccactacgtgaaccatcaccctaatcaagttttttggggtcgaggtgccgtaaagcactaaatcggaaccctaaagggagcccccgatttagagcttgacggggaaagccggcgaacgtggcgagaaaggaagggaagaaagcgaaaggagcgggcgctagggcgctggcaagtgtagcggtcacgctgcgcgtaaccaccacacccgccgcgcttaatgcgccgctacagggcgcgtcaggtg

SEQ ID NO: 3277 - DNA, 5327 bp, Artificial Sequence
  Synthetic Construct, AT-120 intein modified protein encoding nucleic acids in pBluescript
gcacttttcggggaaatgtgcgcggaacccctatttgtttatttttctaaatacattcaaatatgtatccgctcatgagacaataaccctgataaatgcttcaataatattgaaaaaggaagagtatgagtattcaacatttccgtgtcgcccttattcccttttttgcggcattttgccttcctgtttttgctcacccagaaacgctggtgaaagtaaaagatgctgaagatcagttgggtgcacgagtgggttacatcgaactggatctcaacagcggtaagatccttgagagttttcgccccgaagaacgttttccaatgatgagcacttttaaagttctgctatgtggcgcggtattatcccgtattgacgccgggcaagagcaactcggtcgccgcatacactattctcagaatgacttggttgagtactcaccagtcacagaaaagcatcttacggatggcatgacagtaagagaattatgcagtgctgccataaccatgagtgataacactgcggccaacttacttctgacaacgatcggaggaccgaaggagctaaccgcttttttgcacaacatgggggatcatgtaactcgccttgatcgttgggaaccggagctgaatgaagccataccaaacgacgagcgtgacaccacgatgcctgtagcaatggcaacaacgttgcgcaaactattaactggcgaactacttactctagcttcccggcaacaattaatagactggatggaggcggataaagttgcaggaccacttctgcgctcggcccttccggctggctggtttattgctgataaatctggagccggtgagcgtgggtctcgcggtatcattgcagcactggggccagatggtaagccctcccgtatcgtagttatctacacgacggggagtcaggcaactatggatgaacgaaatagacagatcgctgagataggtgcctcactgattaagcattggtaactgtcagaccaagtttactcatatatactttagattgatttaaaacttcatttttaatttaaaaggatctaggtgaagatcctttttgataatctcatgaccaaaatcccttaacgtgagttttcgttccactgagcgtcagaccccgtagaaaagatcaaaggatcttcttgagatcctttttttctgcgcgtaatctgctgcttgcaaacaaaaaaaccaccgctaccagcggtggtttgtttgccggatcaagagctaccaactctttttccgaaggtaactggcttcagcagagcgcagataccaaatactgtccttctagtgtagccgtagttaggccaccacttcaagaactctgtagcaccgcctacatacctcgctctgctaatcctgttaccagtggctgctgccagtggcgataagtcgtgtcttaccgggttggactcaagacgatagttaccggataaggcgcagcggtcgggctgaacggggggttcgtgcacacagcccagcttggagcgaacgacctacaccgaactgagatacctacagcgtgagctatgagaaagcgccacgcttcccgaagggagaaaggcggacaggtatccggtaagcggcagggtcggaacaggagagcgcacgagggagcttccagggggaaacgcctggtatctttatagtcctgtcgggtttcgccacctctgacttgagcgtcgatttttgtgatgctcgtcaggggggcggagcctatggaaaaacgccagcaacgcggcctttttacggttcctggccttttgctggccttttgctcacatgttctttcctgcgttatcccctgattctgtggataaccgtattaccgcctttgagtgagctgataccgctcgccgcagccgaacgaccgagcgcagcgagtcagtgagcgaggaagcggaagagcgcccaatacgcaaaccgcctctccccgcgcgttggccgattcattaatgcagctggcacgacaggtttcccgactggaaagcgggcagtgagcgcaacgcaattaatgtgagttagctcactcattaggcaccccaggctttacactttatgcttccggctcgtatgttgtgtggaattgtgagcggataacaatttcacacaggaaacagcatatgcaaacaagcattactctgacatccaacgcatccggtacgtttgacggttactattacgaactctggaaggatactggcaatacaacaatgacggtctacactcaaggtcgcttttcctgccagtggtcgaacatcaataacgcgttgtttaggaccgggaagaaatacaaccagaattggcagtctcttggcacaatccggatcacgtactctgcgacttacaacccaaacgggaactcctacttgtgtatctatggctggtctaccaacccattggtcgagttctacatcgttgagtcctgggggaactggagaccgcctggtgcctgcttcgctaaggggacacaggttatgatggcggacgggtcggacaagtcgattgaggatattcagctcggggagaatgttatgggcaaggacggcacaccaaggactgtgatctccctcccccgcgggaaggagacaatgtacgaggtctgccactccagcaccaagggcaccacgaaggacacgctgatgaactacgtgtgcagcgggaatcataagatcgtcatgcagacaccacagcagatcggcattactgagcacggcattgacgggaagacctacacgagcgtctcgtacttcgctctcagggattcgcagcacggctaccctatcgttaagaagctgacgaagtctttcgagcatcagcagcacggcgggaaggagcagaccctcatcacggttaacaatttcgtgtcgtctctgaagtcggagccgattaactgggacgtggaggccaagcattacgagtccctcggccactacgtcaagaagtgcagctaccagctgatcaacccggttttccatcagagcggcaagctcgcccaggagattgcgtcgctgaattactctaaggacaaggctcccctcctggcctggctcatcggcttctgggtgggcaacggggctatgcgccactctcagttcgtggtcgagtcacaggacattgagctcgtcaacaggatccaggatattgcgggcctcctgaatctgtccgcgacaactgcttgctactactctggctcaaaggacgatgaggccaagctcgcgaagctgaactcatccagcgctgagggcttcgaggacgacctggaggggaatccaagcgtgaaggagctcgcggacatggataggctgtccgagagcaagacagcgactctgcctaccgctttcggcgtcgagaacatcgacgagctcatcatttcactgggcgaggggaggggcaacgggaatgtcttcgcccaggttatcggctctttcgggattgacctcgctgacaaggatacactggttactaagatcgcccatgagctcgctggcgacgccttcgaggtgagggagcagttcgtggctggcctggtcgatgctgctggctacgtgcgcaaggacgtgtacgatcacgcgtcagaggctaccatctccacggagtcgaagtctaccgtcctcggcctggttaagattgccaggtccctggggatcaagattaccgtgacgtcagacgattccgacgatagcgacgagcacgatcatgcgcactgcggccatgaccacgggtcgtcttcatcctacacagccgtcatgactggggatgcgctcacgaacagcatgcggttctgcgcgatcggccgcaatagggttgctgccaaggagttcatgcgccaggctgtgcccttctacttcagcctggagaagaagtcggaggacgattactacggcatcacagttccagataatacggataagcagtacctgctctcttctatggctctcgttcataatacgtccctgggccaagtgacaatcgatggcgggacctacgacatctataggacgacacgcgtcaaccagccttccattgtggggacagccacgttcgatcagtactggagcgtgcgcacctctaagcggacttcaggaacagtgaccgtgaccgatcacttccgcgcctgggcgaaccggggcctgaacctcggcacaatagaccaaattacattgtgcgtggagggttaccaaagctctggatcagccaacatcacccagaacaccttctctcagggctcttcttccggcagttcgggtggctcatccggctccacaacgactactcgcatcgagtgtgagaacatgtccttgtccggaccctacgttagcaggatcaccaatccctttaatggtattgcgctgtacgccaacggagacacagcccgcgctaccgttaacttccccgcaagtcgcaactacaatttccgcctgcggggttgcggcaacaacaataatcttgcccgtgtggacctgaggatcgacggacggaccgtcgggaccttttattaccagggcacatacccctgggaggccccaattgacaatgtttatgtcagtgcggggagtcatacagtcgaaatcactgttactgcggataacggcacatgggacgtgtatgccgactacctggtgatacagtgactcgagggggggcccggtacccaattcgccctatagtgagtcgtattacaattcactggccgtcgttttacaacgtcgtgactgggaaaaccctggcgttacccaacttaatcgccttgcagcacatccccctttcgccagctggcgtaatagcgaagaggcccgcaccgatcgcccttcccaacagttgcgcagcctgaatggcgaatggaaattgtaagcgttaatattttgttaaaattcgcgttaaatttttgttaaatcagctcattttttaaccaataggccgaaatcggcaaaatcccttataaatcaaaagaatagaccgagatagggttgagtgttgttccagtttggaacaagagtccactattaaagaacgtggactccaacgtcaaagggcgaaaaaccgtctatcagggcgatggcccactacgtgaaccatcaccctaatcaagttttttggggtcgaggtgccgtaaagcactaaatcggaaccctaaagggagcccccgatttagagcttgacggggaaagccggcgaacgtggcgagaaaggaagggaagaaagcgaaaggagcgggcgctagggcgctggcaagtgtagcggtcacgctgcgcgtaaccaccacacccgccgcgcttaatgcgccgctacagggcgcgtcaggtg

SEQ ID NO: 3278 - DNA, 5270 bp, Artificial Sequence
  Synthetic Construct, AT-121 intein modified protein encoding nucleic acids in pBluescript
gcacttttcggggaaatgtgcgcggaacccctatttgtttatttttctaaatacattcaaatatgtatccgctcatgagacaataaccctgataaatgcttcaataatattgaaaaaggaagagtatgagtattcaacatttccgtgtcgcccttattcccttttttgcggcattttgccttcctgtttttgctcacccagaaacgctggtgaaagtaaaagatgctgaagatcagttgggtgcacgagtgggttacatcgaactggatctcaacagcggtaagatccttgagagttttcgccccgaagaacgttttccaatgatgagcacttttaaagttctgctatgtggcgcggtattatcccgtattgacgccgggcaagagcaactcggtcgccgcatacactattctcagaatgacttggttgagtactcaccagtcacagaaaagcatcttacggatggcatgacagtaagagaattatgcagtgctgccataaccatgagtgataacactgcggccaacttacttctgacaacgatcggaggaccgaaggagctaaccgcttttttgcacaacatgggggatcatgtaactcgccttgatcgttgggaaccggagctgaatgaagccataccaaacgacgagcgtgacaccacgatgcctgtagcaatggcaacaacgttgcgcaaactattaactggcgaactacttactctagcttcccggcaacaattaatagactggatggaggcggataaagttgcaggaccacttctgcgctcggcccttccggctggctggtttattgctgataaatctggagccggtgagcgtgggtctcgcggtatcattgcagcactggggccagatggtaagccctcccgtatcgtagttatctacacgacggggagtcaggcaactatggatgaacgaaatagacagatcgctgagataggtgcctcactgattaagcattggtaactgtcagaccaagtttactcatatatactttagattgatttaaaacttcatttttaatttaaaaggatctaggtgaagatcctttttgataatctcatgaccaaaatcccttaacgtgagttttcgttccactgagcgtcagaccccgtagaaaagatcaaaggatcttcttgagatcctttttttctgcgcgtaatctgctgcttgcaaacaaaaaaaccaccgctaccagcggtggtttgtttgccggatcaagagctaccaactctttttccgaaggtaactggcttcagcagagcgcagataccaaatactgtccttctagtgtagccgtagttaggccaccacttcaagaactctgtagcaccgcctacatacctcgctctgctaatcctgttaccagtggctgctgccagtggcgataagtcgtgtcttaccgggttggactcaagacgatagttaccggataaggcgcagcggtcgggctgaacggggggttcgtgcacacagcccagcttggagcgaacgacctacaccgaactgagatacctacagcgtgagctatgagaaagcgccacgcttcccgaagggagaaaggcggacaggtatccggtaagcggcagggtcggaacaggagagcgcacgagggagcttccagggggaaacgcctggtatctttatagtcctgtcgggtttcgccacctctgacttgagcgtcgatttttgtgatgctcgtcaggggggcggagcctatggaaaaacgccagcaacgcggcctttttacggttcctggccttttgctggccttttgctcacatgttctttcctgcgttatcccctgattctgtggataaccgtattaccgcctttgagtgagctgataccgctcgccgcagccgaacgaccgagcgcagcgagtcagtgagcgaggaagcggaagagcgcccaatacgcaaaccgcctctccccgcgcgttggccgattcattaatgcagctggcacgacaggtttcccgactggaaagcgggcagtgagcgcaacgcaattaatgtgagttagctcactcattaggcaccccaggctttacactttatgcttccggctcgtatgttgtgtggaattgtgagcggataacaatttcacacaggaaacagcatatgcaaacaagcattactctgacatccaacgcatccggtacgtttgacggttactattacgaactctggaaggatactggcaatacaacaatgacggtctacactcaaggtcgcttttcctgccagtggtcgaacatcaataacgcgttgtttaggaccgggaagaaatacaaccagaattggcagtctcttggcacaatccggatcacgtactctgcgacttacaacccaaacgggaactcctacttgtgtatctatggctggtctaccaacccattggtcgagttctacatcgttgagtcctgggggaactggagaccgcctggtgcctcagtctcttacgatacgccagtcctcatcagggaccctattaacaagatccatctcgtgaagatcggggagttcattgataagttctacgaggagggcgaggagaggacggctaagcacgtgaatgggtactacgtcctctcccatgacggcttccaggtggtctggaagccgatcaagtatgtgctgcggcaccgcacaaacgagatctacgagatcatctacgagggcgggggcaagctggaggctaccggctcgcattctgttttcgtgctcgacccggatacgctggatatcgtcgagaagcccgttatgctcctgaataagggggagtacctggtttctttcaacggcgtgaaggagaataaggaccaccagacaatcgacctcattgatctggtttcggactacaacgatgtctacgttgataatatcccatctgagctcaagaagcatactgggggcaggaacccaatccctctcaagcagtacatgatcctgaggaagcgggtcattacaaagaagaacaatagcctcatcaagctgcgcaggtcgaagtacactctcccgattcggctcgtgctggacgagaagctcgccttcctgttcggggcctacatcgctaacggctgcgtcaaggagaggagggacaagctgatctgcttcaccttcggcaagtccgccaagaacatcgcggataaggtcatgaatattatgtacgagaagttcaacatcaagccattcattgacgatagggggacatacatcatctacgagtaccctcacactctcctggcgatcattttcgagaagctcctgggccgcaagctggaggagaagaagatgccagagatcctgtggtccagccctaagagcgtgattcgcgcgttcttcgagggcctcagggcttactcccagcgcaccctgaggaggaggtacacgagctacaccacggctaacaagaatctcgcctaccagctcctgtggctggctaggttcgctggcttctactcggtcctcaaggaggagaaggaggccgggaagaacaatggcaagacgtactaccatgtgatcgtctacctggaccagtcttacaggaagccgaacgcgtcagagcgggttccggtgaagcccatcctcaagctgattaagtacacaaagccaaggactatgccaccagagctcgcttacatcaagaggcgggagttcatttcaaggaagaccgcgctcaaggctctggagtggatccgcagggacggctcattcacggatttctcccgcgagtacctcaggaagatcgagtccctgattaacggggacatcattgtcctgaagatcaaggatgttcgcaagaagcagtacaagggctacgtgtacgacatttcagttccaattacggaggctttcttcgggggcaacattccaatcctgctccacaacacgtccctgggccaagtgacaatcgatggcgggacctacgacatctataggacgacacgcgtcaaccagccttccattgtggggacagccacgttcgatcagtactggagcgtgcgcacctctaagcggacttcaggaacagtgaccgtgaccgatcacttccgcgcctgggcgaaccggggcctgaacctcggcacaatagaccaaattacattgtgcgtggagggttaccaaagctctggatcagccaacatcacccagaacaccttctctcagggctcttcttccggcagttcgggtggctcatccggctccacaacgactactcgcatcgagtgtgagaacatgtccttgtccggaccctacgttagcaggatcaccaatccctttaatggtattgcgctgtacgccaacggagacacagcccgcgctaccgttaacttccccgcaagtcgcaactacaatttccgcctgcggggttgcggcaacaacaataatcttgcccgtgtggacctgaggatcgacggacggaccgtcgggaccttttattaccagggcacatacccctgggaggccccaattgacaatgtttatgtcagtgcggggagtcatacagtcgaaatcactgttactgcggataacggcacatgggacgtgtatgccgactacctggtgatacagtgactcgagggggggcccggtacccaattcgccctatagtgagtcgtattacaattcactggccgtcgttttacaacgtcgtgactgggaaaaccctggcgttacccaacttaatcgccttgcagcacatccccctttcgccagctggcgtaatagcgaagaggcccgcaccgatcgcccttcccaacagttgcgcagcctgaatggcgaatggaaattgtaagcgttaatattttgttaaaattcgcgttaaatttttgttaaatcagctcattttttaaccaataggccgaaatcggcaaaatcccttataaatcaaaagaatagaccgagatagggttgagtgttgttccagtttggaacaagagtccactattaaagaacgtggactccaacgtcaaagggcgaaaaaccgtctatcagggcgatggcccactacgtgaaccatcaccctaatcaagttttttggggtcgaggtgccgtaaagcactaaatcggaaccctaaagggagcccccgatttagagcttgacggggaaagccggcgaacgtggcgagaaaggaagggaagaaagcgaaaggagcgggcgctagggcgctggcaagtgtagcggtcacgctgcgcgtaaccaccacacccgccgcgcttaatgcgccgctacagggcgcgtcaggtg

SEQ ID NO: 3279 - DNA, 4880 bp, Artificial Sequence
  Synthetic Construct, AT-122 intein modified protein encoding nucleic acids in pBluescript
gcacttttcggggaaatgtgcgcggaacccctatttgtttatttttctaaatacattcaaatatgtatccgctcatgagacaataaccctgataaatgcttcaataatattgaaaaaggaagagtatgagtattcaacatttccgtgtcgcccttattcccttttttgcggcattttgccttcctgtttttgctcacccagaaacgctggtgaaagtaaaagatgctgaagatcagttgggtgcacgagtgggttacatcgaactggatctcaacagcggtaagatccttgagagttttcgccccgaagaacgttttccaatgatgagcacttttaaagttctgctatgtggcgcggtattatcccgtattgacgccgggcaagagcaactcggtcgccgcatacactattctcagaatgacttggttgagtactcaccagtcacagaaaagcatcttacggatggcatgacagtaagagaattatgcagtgctgccataaccatgagtgataacactgcggccaacttacttctgacaacgatcggaggaccgaaggagctaaccgcttttttgcacaacatgggggatcatgtaactcgccttgatcgttgggaaccggagctgaatgaagccataccaaacgacgagcgtgacaccacgatgcctgtagcaatggcaacaacgttgcgcaaactattaactggcgaactacttactctagcttcccggcaacaattaatagactggatggaggcggataaagttgcaggaccacttctgcgctcggcccttccggctggctggtttattgctgataaatctggagccggtgagcgtgggtctcgcggtatcattgcagcactggggccagatggtaagccctcccgtatcgtagttatctacacgacggggagtcaggcaactatggatgaacgaaatagacagatcgctgagataggtgcctcactgattaagcattggtaactgtcagaccaagtttactcatatatactttagattgatttaaaacttcatttttaatttaaaaggatctaggtgaagatcctttttgataatctcatgaccaaaatcccttaacgtgagttttcgttccactgagcgtcagaccccgtagaaaagatcaaaggatcttcttgagatcctttttttctgcgcgtaatctgctgcttgcaaacaaaaaaaccaccgctaccagcggtggtttgtttgccggatcaagagctaccaactctttttccgaaggtaactggcttcagcagagcgcagataccaaatactgtccttctagtgtagccgtagttaggccaccacttcaagaactctgtagcaccgcctacatacctcgctctgctaatcctgttaccagtggctgctgccagtggcgataagtcgtgtcttaccgggttggactcaagacgatagttaccggataaggcgcagcggtcgggctgaacggggggttcgtgcacacagcccagcttggagcgaacgacctacaccgaactgagatacctacagcgtgagctatgagaaagcgccacgcttcccgaagggagaaaggcggacaggtatccggtaagcggcagggtcggaacaggagagcgcacgagggagcttccagggggaaacgcctggtatctttatagtcctgtcgggtttcgccacctctgacttgagcgtcgatttttgtgatgctcgtcaggggggcggagcctatggaaaaacgccagcaacgcggcctttttacggttcctggccttttgctggccttttgctcacatgttctttcctgcgttatcccctgattctgtggataaccgtattaccgcctttgagtgagctgataccgctcgccgcagccgaacgaccgagcgcagcgagtcagtgagcgaggaagcggaagagcgcccaatacgcaaaccgcctctccccgcgcgttggccgattcattaatgcagctggcacgacaggtttcccgactggaaagcgggcagtgagcgcaacgcaattaatgtgagttagctcactcattaggcaccccaggctttacactttatgcttccggctcgtatgttgtgtggaattgtgagcggataacaatttcacacaggaaacagcatatgcaaacaagcattactctgacatccaacgcatccggtacgtttgacggttactattacgaactctggaaggatactggcaatacaacaatgacggtctacactcaaggtcgcttttcctgccagtggtcgaacatcaataacgcgttgtttaggaccgggaagaaatacaaccagaattggcagtctcttggcacaatccggatcacgtactctgcgacttacaacccaaacgggaactcctacttgtgtatctatggctggtctaccaacccattggtcgagttctacatcgttgagtcctgggggaactggagaccgcctggtgcctcataccataaggatttcaagattatgctcgctgacgggcgcaaggttcgcatcggggatctcgtggatgagctgatcggcaagaatagggagaaggttatcaagggcaaggacacagagattctgttcgtggacgatctcttcctcctgtcgtacaatatgcggtctggggagcaggttctggtgaaggctgatcgggtgagccgccacaaggctccagaccagttcatcaagctgcgcttctcgaacggcgctgagatcattgtcaccccggagcatcccgttctcatcattaacaatggcaagatcaagaccgttagggcggatacggtgcggaaggggaccctgacgatcggcgtgctcgggcacaagatcattaaggaggtcaacgaggacgatatcattaacaatatccgcaggaagattgtgctggacaaggagctcccgtacatccacgctaagaatatttcagaggccgtcgagatgcgggaccagctgatgtccatcgatattcccaccttcatcgttaagcataagaacgagattcgcctgtacccatccggcccttgcagcctcaggaggctcctgctcatgcacggggtcgaggaggtggtcttctcggacgagctgctctacgagatcatgaattgccatctctacccggccacctggtacgagctgctctactccatgggcctgacgaagatcgccaaggagctcaacgtgtacgacttcgagattctggcgggcatcattaagaaggtggagaaggaggtcatcatgctctctcaggtcctggggctccgcaacgagacacagactgagctgctccatctgaagtcaaggcgggagctgctcatcaggctcaaggacaagctggatatgctccgcaagaggctgaaggacctggaggaggccctcggcaaggatgccgtgatcaggatgattacagacgtcgaggttatcaagaacactgactccgattgggtctacgacattactattgagccttaccacctcttcgtttcggatgggctcattctgcataacacgtccctgggccaagtgacaatcgatggcgggacctacgacatctataggacgacacgcgtcaaccagccttccattgtggggacagccacgttcgatcagtactggagcgtgcgcacctctaagcggacttcaggaacagtgaccgtgaccgatcacttccgcgcctgggcgaaccggggcctgaacctcggcacaatagaccaaattacattgtgcgtggagggttaccaaagctctggatcagccaacatcacccagaacaccttctctcagggctcttcttccggcagttcgggtggctcatccggctccacaacgactactcgcatcgagtgtgagaacatgtccttgtccggaccctacgttagcaggatcaccaatccctttaatggtattgcgctgtacgccaacggagacacagcccgcgctaccgttaacttccccgcaagtcgcaactacaatttccgcctgcggggttgcggcaacaacaataatcttgcccgtgtggacctgaggatcgacggacggaccgtcgggaccttttattaccagggcacatacccctgggaggccccaattgacaatgtttatgtcagtgcggggagtcatacagtcgaaatcactgttactgcggataacggcacatgggacgtgtatgccgactacctggtgatacagtgactcgagggggggcccggtacccaattcgccctatagtgagtcgtattacaattcactggccgtcgttttacaacgtcgtgactgggaaaaccctggcgttacccaacttaatcgccttgcagcacatccccctttcgccagctggcgtaatagcgaagaggcccgcaccgatcgcccttcccaacagttgcgcagcctgaatggcgaatggaaattgtaagcgttaatattttgttaaaattcgcgttaaatttttgttaaatcagctcattttttaaccaataggccgaaatcggcaaaatcccttataaatcaaaagaatagaccgagatagggttgagtgttgttccagtttggaacaagagtccactattaaagaacgtggactccaacgtcaaagggcgaaaaaccgtctatcagggcgatggcccactacgtgaaccatcaccctaatcaagttttttggggtcgaggtgccgtaaagcactaaatcggaaccctaaagggagcccccgatttagagcttgacggggaaagccggcgaacgtggcgagaaaggaagggaagaaagcgaaaggagcgggcgctagggcgctggcaagtgtagcggtcacgctgcgcgtaaccaccacacccgccgcgcttaatgcgccgctacagggcgcgtcaggtg

SEQ ID NO: 3280 - DNA, 4862 bp, Artificial Sequence
  Synthetic Construct, AT-123 intein modified protein encoding nucleic acids in pBluescript
gcacttttcggggaaatgtgcgcggaacccctatttgtttatttttctaaatacattcaaatatgtatccgctcatgagacaataaccctgataaatgcttcaataatattgaaaaaggaagagtatgagtattcaacatttccgtgtcgcccttattcccttttttgcggcattttgccttcctgtttttgctcacccagaaacgctggtgaaagtaaaagatgctgaagatcagttgggtgcacgagtgggttacatcgaactggatctcaacagcggtaagatccttgagagttttcgccccgaagaacgttttccaatgatgagcacttttaaagttctgctatgtggcgcggtattatcccgtattgacgccgggcaagagcaactcggtcgccgcatacactattctcagaatgacttggttgagtactcaccagtcacagaaaagcatcttacggatggcatgacagtaagagaattatgcagtgctgccataaccatgagtgataacactgcggccaacttacttctgacaacgatcggaggaccgaaggagctaaccgcttttttgcacaacatgggggatcatgtaactcgccttgatcgttgggaaccggagctgaatgaagccataccaaacgacgagcgtgacaccacgatgcctgtagcaatggcaacaacgttgcgcaaactattaactggcgaactacttactctagcttcccggcaacaattaatagactggatggaggcggataaagttgcaggaccacttctgcgctcggcccttccggctggctggtttattgctgataaatctggagccggtgagcgtgggtctcgcggtatcattgcagcactggggccagatggtaagccctcccgtatcgtagttatctacacgacggggagtcaggcaactatggatgaacgaaatagacagatcgctgagataggtgcctcactgattaagcattggtaactgtcagaccaagtttactcatatatactttagattgatttaaaacttcatttttaatttaaaaggatctaggtgaagatcctttttgataatctcatgaccaaaatcccttaacgtgagttttcgttccactgagcgtcagaccccgtagaaaagatcaaaggatcttcttgagatcctttttttctgcgcgtaatctgctgcttgcaaacaaaaaaaccaccgctaccagcggtggtttgtttgccggatcaagagctaccaactctttttccgaaggtaactggcttcagcagagcgcagataccaaatactgtccttctagtgtagccgtagttaggccaccacttcaagaactctgtagcaccgcctacatacctcgctctgctaatcctgttaccagtggctgctgccagtggcgataagtcgtgtcttaccgggttggactcaagacgatagttaccggataaggcgcagcggtcgggctgaacggggggttcgtgcacacagcccagcttggagcgaacgacctacaccgaactgagatacctacagcgtgagctatgagaaagcgccacgcttcccgaagggagaaaggcggacaggtatccggtaagcggcagggtcggaacaggagagcgcacgagggagcttccagggggaaacgcctggtatctttatagtcctgtcgggtttcgccacctctgacttgagcgtcgatttttgtgatgctcgtcaggggggcggagcctatggaaaaacgccagcaacgcggcctttttacggttcctggccttttgctggccttttgctcacatgttctttcctgcgttatcccctgattctgtggataaccgtattaccgcctttgagtgagctgataccgctcgccgcagccgaacgaccgagcgcagcgagtcagtgagcgaggaagcggaagagcgcccaatacgcaaaccgcctctccccgcgcgttggccgattcattaatgcagctggcacgacaggtttcccgactggaaagcgggcagtgagcgcaacgcaattaatgtgagttagctcactcattaggcaccccaggctttacactttatgcttccggctcgtatgttgtgtggaattgtgagcggataacaatttcacacaggaaacagcatatgcaaacaagcattactctgacatccaacgcatccggtacgtttgacggttactattacgaactctggaaggatactggcaatacaacaatgacggtctacactcaaggtcgcttttcctgccagtggtcgaacatcaataacgcgttgtttaggaccgggaagaaatacaaccagaattggcagtctcttggcacaatccggatcacgtactctgcgacttacaacccaaacgggaactcctacttgtgtatctatggctggtctaccaacccattggtcgagttctacatcgttgagtcctgggggaactggagaccgcctggtgcctgcctcgggaaggggacaccggttatgatgtacgatgggcggacaaagccagtggagaaggtggaggtcggggacaggctcatgggggacgatggcagcccaaggacggtgcagtcgctggccagggggagggagcagatgtactgggtccgccagaagaggggcatggactacagggttaacgagagccacatcctctcgctgaagaagtctaggagggagggcgcccgcgacagggggtcaatcgcggatatttccgtccgcgactacctggatcagtctgacaagtggaaggacgataacaagggcttcaaggtggctgctgagttcccagaccagccagtccccctcgatccttacttcctcggcctgtggctcggcgatgggaagtccgacaatgctaggatctacaccacggacgaggaggtcatcacgggcctgcaggagattgccgagaagcggggggacacaatttcagtgtccgatgagcatcggcgctgcccagcctacctcgtcaagtctggcgacaggggcggggctatggctaccagggagtcagttcagggcgctctgagggctctcggcgtgctgggggacaagcacatccctcatctgtacctcggcaactccagggggaagcggctcaggctcctggctggcctgattgacagcgatggccacctcaatgacgggcatggcgggacgtacgagatcacacagtccagcgagcagctggcgagggacattaagttcctctgcgatactctgggctaccggacatcgctcactcagaagaccgctcgcatctcgtctaccggctacgagtccgaggttcacagggtgcggttcaacgggaatgttgacgagattccggtgcgggtcgagcgcaagaaggcttccccatggactgatgtcagggactggcggatgaccggcatcgatgtcgagcccgacggcgttggggattacttcggcttcactctggatggcaatgggcgcttcctcctcggggatggcactgttactcataatacgtccctgggccaagtgacaatcgatggcgggacctacgacatctataggacgacacgcgtcaaccagccttccattgtggggacagccacgttcgatcagtactggagcgtgcgcacctctaagcggacttcaggaacagtgaccgtgaccgatcacttccgcgcctgggcgaaccggggcctgaacctcggcacaatagaccaaattacattgtgcgtggagggttaccaaagctctggatcagccaacatcacccagaacaccttctctcagggctcttcttccggcagttcgggtggctcatccggctccacaacgactactcgcatcgagtgtgagaacatgtccttgtccggaccctacgttagcaggatcaccaatccctttaatggtattgcgctgtacgccaacggagacacagcccgcgctaccgttaacttccccgcaagtcgcaactacaatttccgcctgcggggttgcggcaacaacaataatcttgcccgtgtggacctgaggatcgacggacggaccgtcgggaccttttattaccagggcacatacccctgggaggccccaattgacaatgtttatgtcagtgcggggagtcatacagtcgaaatcactgttactgcggataacggcacatgggacgtgtatgccgactacctggtgatacagtgactcgagggggggcccggtacccaattcgccctatagtgagtcgtattacaattcactggccgtcgttttacaacgtcgtgactgggaaaaccctggcgttacccaacttaatcgccttgcagcacatccccctttcgccagctggcgtaatagcgaagaggcccgcaccgatcgcccttcccaacagttgcgcagcctgaatggcgaatggaaattgtaagcgttaatattttgttaaaattcgcgttaaatttttgttaaatcagctcattttttaaccaataggccgaaatcggcaaaatcccttataaatcaaaagaatagaccgagatagggttgagtgttgttccagtttggaacaagagtccactattaaagaacgtggactccaacgtcaaagggcgaaaaaccgtctatcagggcgatggcccactacgtgaaccatcaccctaatcaagttttttggggtcgaggtgccgtaaagcactaaatcggaaccctaaagggagcccccgatttagagcttgacggggaaagccggcgaacgtggcgagaaaggaagggaagaaagcgaaaggagcgggcgctagggcgctggcaagtgtagcggtcacgctgcgcgtaaccaccacacccgccgcgcttaatgcgccgctacagggcgcgtcaggtg

SEQ ID NO: 3281 - DNA, 4904 bp, Artificial Sequence
  Synthetic Construct, AT-124 intein modified protein encoding nucleic acids in pBluescript
gcacttttcggggaaatgtgcgcggaacccctatttgtttatttttctaaatacattcaaatatgtatccgctcatgagacaataaccctgataaatgcttcaataatattgaaaaaggaagagtatgagtattcaacatttccgtgtcgcccttattcccttttttgcggcattttgccttcctgtttttgctcacccagaaacgctggtgaaagtaaaagatgctgaagatcagttgggtgcacgagtgggttacatcgaactggatctcaacagcggtaagatccttgagagttttcgccccgaagaacgttttccaatgatgagcacttttaaagttctgctatgtggcgcggtattatcccgtattgacgccgggcaagagcaactcggtcgccgcatacactattctcagaatgacttggttgagtactcaccagtcacagaaaagcatcttacggatggcatgacagtaagagaattatgcagtgctgccataaccatgagtgataacactgcggccaacttacttctgacaacgatcggaggaccgaaggagctaaccgcttttttgcacaacatgggggatcatgtaactcgccttgatcgttgggaaccggagctgaatgaagccataccaaacgacgagcgtgacaccacgatgcctgtagcaatggcaacaacgttgcgcaaactattaactggcgaactacttactctagcttcccggcaacaattaatagactggatggaggcggataaagttgcaggaccacttctgcgctcggcccttccggctggctggtttattgctgataaatctggagccggtgagcgtgggtctcgcggtatcattgcagcactggggccagatggtaagccctcccgtatcgtagttatctacacgacggggagtcaggcaactatggatgaacgaaatagacagatcgctgagataggtgcctcactgattaagcattggtaactgtcagaccaagtttactcatatatactttagattgatttaaaacttcatttttaatttaaaaggatctaggtgaagatcctttttgataatctcatgaccaaaatcccttaacgtgagttttcgttccactgagcgtcagaccccgtagaaaagatcaaaggatcttcttgagatcctttttttctgcgcgtaatctgctgcttgcaaacaaaaaaaccaccgctaccagcggtggtttgtttgccggatcaagagctaccaactctttttccgaaggtaactggcttcagcagagcgcagataccaaatactgtccttctagtgtagccgtagttaggccaccacttcaagaactctgtagcaccgcctacatacctcgctctgctaatcctgttaccagtggctgctgccagtggcgataagtcgtgtcttaccgggttggactcaagacgatagttaccggataaggcgcagcggtcgggctgaacggggggttcgtgcacacagcccagcttggagcgaacgacctacaccgaactgagatacctacagcgtgagctatgagaaagcgccacgcttcccgaagggagaaaggcggacaggtatccggtaagcggcagggtcggaacaggagagcgcacgagggagcttccagggggaaacgcctggtatctttatagtcctgtcgggtttcgccacctctgacttgagcgtcgatttttgtgatgctcgtcaggggggcggagcctatggaaaaacgccagcaacgcggcctttttacggttcctggccttttgctggccttttgctcacatgttctttcctgcgttatcccctgattctgtggataaccgtattaccgcctttgagtgagctgataccgctcgccgcagccgaacgaccgagcgcagcgagtcagtgagcgaggaagcggaagagcgcccaatacgcaaaccgcctctccccgcgcgttggccgattcattaatgcagctggcacgacaggtttcccgactggaaagcgggcagtgagcgcaacgcaattaatgtgagttagctcactcattaggcaccccaggctttacactttatgcttccggctcgtatgttgtgtggaattgtgagcggataacaatttcacacaggaaacagcatatgcaaacaagcattactctgacatccaacgcatccggtacgtttgacggttactattacgaactctggaaggatactggcaatacaacaatgacggtctacactcaaggtcgcttttcctgccagtggtcgaacatcaataacgcgttgtttaggaccgggaagaaatacaaccagaattggcagtctcttggcacaatccggatcacgtactctgcgacttacaacccaaacgggaactcctacttgtgtatctatggctggtctaccaacccattggtcgagttctacatcgttgagtcctgggggaactggagaccgcctggtgcctgcttcgatcctgagacagaggtcgtgacagtggacggcattaggcatgtggaggagattgaggtcggggatagggtttactcgctgaacccagacacgggcgctgtcgagatcaagcccgttaccgcgacgcagagccagcattacgctggcccgatggtggagattaagaaccagcataccgacttcctggtcacgcccaatcaccgcttcctcacacagaggttcacttcgggcgagtacacagatctggagtgggagactgctggcgacatgctcggggatcgcatccgcaggaggctcccatcactgaggtccctccctgctacacaggagaggccaggccctatctcactgtccgctgtgtgcgacaggctcgctatcgagcacaagactggcccacgcgggattaaggagctgaggaggcaggctaggtggcagcctgaggagtacgagctcacagattggctgaggatcctcggctggttcgccacagaggggactctgtacaagtctaaggcgaggcagtacgagaacggcaatgtgcggggggtctcataccagaccacgctctgccagaagaacgacatcggccgctccgagattgcgacgctcctgaacaggaccgggatcacgtactccagcgaccagaatgatcatagcttctgctcgaaggttctgtacgagattctggaggctgagtgcggcagcgactcgttctctaagcacctgccaccatggatcttccagctggggccaaaggacctcaagattgtcttcgataccctcatgcagggcgactccgctgctaacggggatcggttcacaacttcgtctaatcagctggccgaggacttcatcaggctcgctatgcacattggcaggagggctttccacatgccgaacgatgggtctcacaggatccaggttaataccgtgaggggccagcggccgacgattaagcccaagcatcggcagcaggtcgactacgatggcatgatccactgcctgaccgtggcggataatcatactgtgctcgctggcaggaataggaagttcaattggactgggcagacgtccctgggccaagtgacaatcgatggcgggacctacgacatctataggacgacacgcgtcaaccagccttccattgtggggacagccacgttcgatcagtactggagcgtgcgcacctctaagcggacttcaggaacagtgaccgtgaccgatcacttccgcgcctgggcgaaccggggcctgaacctcggcacaatagaccaaattacattgtgcgtggagggttaccaaagctctggatcagccaacatcacccagaacaccttctctcagggctcttcttccggcagttcgggtggctcatccggctccacaacgactactcgcatcgagtgtgagaacatgtccttgtccggaccctacgttagcaggatcaccaatccctttaatggtattgcgctgtacgccaacggagacacagcccgcgctaccgttaacttccccgcaagtcgcaactacaatttccgcctgcggggttgcggcaacaacaataatcttgcccgtgtggacctgaggatcgacggacggaccgtcgggaccttttattaccagggcacatacccctgggaggccccaattgacaatgtttatgtcagtgcggggagtcatacagtcgaaatcactgttactgcggataacggcacatgggacgtgtatgccgactacctggtgatacagtgactcgagggggggcccggtacccaattcgccctatagtgagtcgtattacaattcactggccgtcgttttacaacgtcgtgactgggaaaaccctggcgttacccaacttaatcgccttgcagcacatccccctttcgccagctggcgtaatagcgaagaggcccgcaccgatcgcccttcccaacagttgcgcagcctgaatggcgaatggaaattgtaagcgttaatattttgttaaaattcgcgttaaatttttgttaaatcagctcattttttaaccaataggccgaaatcggcaaaatcccttataaatcaaaagaatagaccgagatagggttgagtgttgttccagtttggaacaagagtccactattaaagaacgtggactccaacgtcaaagggcgaaaaaccgtctatcagggcgatggcccactacgtgaaccatcaccctaatcaagttttttggggtcgaggtgccgtaaagcactaaatcggaaccctaaagggagcccccgatttagagcttgacggggaaagccggcgaacgtggcgagaaaggaagggaagaaagcgaaaggagcgggcgctagggcgctggcaagtgtagcggtcacgctgcgcgtaaccaccacacccgccgcgcttaatgcgccgctacagggcgcgtcaggtg

SEQ ID NO: 3282 - DNA, 5117 bp, Artificial Sequence
  Synthetic Construct, AT-125 intein modified protein encoding nucleic acids in pBluescript
gcacttttcggggaaatgtgcgcggaacccctatttgtttatttttctaaatacattcaaatatgtatccgctcatgagacaataaccctgataaatgcttcaataatattgaaaaaggaagagtatgagtattcaacatttccgtgtcgcccttattcccttttttgcggcattttgccttcctgtttttgctcacccagaaacgctggtgaaagtaaaagatgctgaagatcagttgggtgcacgagtgggttacatcgaactggatctcaacagcggtaagatccttgagagttttcgccccgaagaacgttttccaatgatgagcacttttaaagttctgctatgtggcgcggtattatcccgtattgacgccgggcaagagcaactcggtcgccgcatacactattctcagaatgacttggttgagtactcaccagtcacagaaaagcatcttacggatggcatgacagtaagagaattatgcagtgctgccataaccatgagtgataacactgcggccaacttacttctgacaacgatcggaggaccgaaggagctaaccgcttttttgcacaacatgggggatcatgtaactcgccttgatcgttgggaaccggagctgaatgaagccataccaaacgacgagcgtgacaccacgatgcctgtagcaatggcaacaacgttgcgcaaactattaactggcgaactacttactctagcttcccggcaacaattaatagactggatggaggcggataaagttgcaggaccacttctgcgctcggcccttccggctggctggtttattgctgataaatctggagccggtgagcgtgggtctcgcggtatcattgcagcactggggccagatggtaagccctcccgtatcgtagttatctacacgacggggagtcaggcaactatggatgaacgaaatagacagatcgctgagataggtgcctcactgattaagcattggtaactgtcagaccaagtttactcatatatactttagattgatttaaaacttcatttttaatttaaaaggatctaggtgaagatcctttttgataatctcatgaccaaaatcccttaacgtgagttttcgttccactgagcgtcagaccccgtagaaaagatcaaaggatcttcttgagatcctttttttctgcgcgtaatctgctgcttgcaaacaaaaaaaccaccgctaccagcggtggtttgtttgccggatcaagagctaccaactctttttccgaaggtaactggcttcagcagagcgcagataccaaatactgtccttctagtgtagccgtagttaggccaccacttcaagaactctgtagcaccgcctacatacctcgctctgctaatcctgttaccagtggctgctgccagtggcgataagtcgtgtcttaccgggttggactcaagacgatagttaccggataaggcgcagcggtcgggctgaacggggggttcgtgcacacagcccagcttggagcgaacgacctacaccgaactgagatacctacagcgtgagctatgagaaagcgccacgcttcccgaagggagaaaggcggacaggtatccggtaagcggcagggtcggaacaggagagcgcacgagggagcttccagggggaaacgcctggtatctttatagtcctgtcgggtttcgccacctctgacttgagcgtcgatttttgtgatgctcgtcaggggggcggagcctatggaaaaacgccagcaacgcggcctttttacggttcctggccttttgctggccttttgctcacatgttctttcctgcgttatcccctgattctgtggataaccgtattaccgcctttgagtgagctgataccgctcgccgcagccgaacgaccgagcgcagcgagtcagtgagcgaggaagcggaagagcgcccaatacgcaaaccgcctctccccgcgcgttggccgattcattaatgcagctggcacgacaggtttcccgactggaaagcgggcagtgagcgcaacgcaattaatgtgagttagctcactcattaggcaccccaggctttacactttatgcttccggctcgtatgttgtgtggaattgtgagcggataacaatttcacacaggaaacagcatatgcaaacaagcattactctgacatccaacgcatccggtacgtttgacggttactattacgaactctggaaggatactggcaatacaacaatgacggtctacactcaaggtcgcttttcctgccagtggtcgaacatcaataacgcgttgtttaggaccgggaagaaatacaaccagaattggcagtctcttggcacaatccggatcacgtactctgcgacttacaacccaaacgggaactcctacttgtgtatctatggctggtctaccaacccattggtcgagttctacatcgttgagtcctgggggaactggagaccgcctggtgcctgcatttcgggggatagcctcattagcctcgcctcaacgggcaagcgggtttcaatcaaggatctgctggatgagaaggatttcgagatctgggcgattaacgagcagaccatgaagctggagtctgctaaggtttcacgcgtgttctgcaccggcaagaagctggtgtacatcctcaagacgcggctggggcgcaccattaaggctacggccaaccacaggttcctcacgatcgacggctggaagcggctggatgagctgtcactcaaggagcatatcgccctcccaaggaagctggagtccagctcgctgcagctcatgtccgacgaggagctcggcctcctggggcacctgatcggcgatgggtgcaccctgcctaggcatgccatccagtacacgagcaacaagattgagctcgcggagaaggtggtcgagctggcgaaggctgtcttcggcgaccagatcaatccgaggatttcccaggagcggcagtggtaccaggtttacatcccggcgagctaccggctcacacacaacaagaagaatcccatcactaagtggctggagaacctcgacgtcttcggcctgcgcagctacgagaagttcgtgccgaatcaggtcttcgagcagccacagagggctatcgcgattttcctgcgccatctctggtcgacagacgggtgcgttaagctcatcgtggagaagtcttcacgccccgttgcttactacgccacttccagcgagaagctggctaaggacgtgcagtccctcctgctcaagctcggcatcaacgcgcgcctgtcaaagatttcccagaacggcaaggggagggataattaccacgtgacaatcactggccaggccgacctccagatcttcgtcgatcagattggggctgttgacaaggataagcaggcctccgtcgaggagatcaagacacacattgcgcagcatcaggctaacactaatagggacgtgatcccaaagcagatttggaagacatacgtcctgcctcagatccagattaagggcatcaccacgcgcgatctccagatgaggctgggcaacgcttactgcgggacggctctctacaagcacaatctgtcgcgcgagagggctgctaagatcgctaccattacgcagtctccggagatcgagaagctctcgcagtctgacatctactgggatagcatcgtgtcgattacagagactggcgtcgaggaggttttcgatctcactgttccagggccacataacttcgttgctaatgacatcatcgtgcataatacgtccctgggccaagtgacaatcgatggcgggacctacgacatctataggacgacacgcgtcaaccagccttccattgtggggacagccacgttcgatcagtactggagcgtgcgcacctctaagcggacttcaggaacagtgaccgtgaccgatcacttccgcgcctgggcgaaccggggcctgaacctcggcacaatagaccaaattacattgtgcgtggagggttaccaaagctctggatcagccaacatcacccagaacaccttctctcagggctcttcttccggcagttcgggtggctcatccggctccacaacgactactcgcatcgagtgtgagaacatgtccttgtccggaccctacgttagcaggatcaccaatccctttaatggtattgcgctgtacgccaacggagacacagcccgcgctaccgttaacttccccgcaagtcgcaactacaatttccgcctgcggggttgcggcaacaacaataatcttgcccgtgtggacctgaggatcgacggacggaccgtcgggaccttttattaccagggcacatacccctgggaggccccaattgacaatgtttatgtcagtgcggggagtcatacagtcgaaatcactgttactgcggataacggcacatgggacgtgtatgccgactacctggtgatacagtgactcgagggggggcccggtacccaattcgccctatagtgagtcgtattacaattcactggccgtcgttttacaacgtcgtgactgggaaaaccctggcgttacccaacttaatcgccttgcagcacatccccctttcgccagctggcgtaatagcgaagaggcccgcaccgatcgcccttcccaacagttgcgcagcctgaatggcgaatggaaattgtaagcgttaatattttgttaaaattcgcgttaaatttttgttaaatcagctcattttttaaccaataggccgaaatcggcaaaatcccttataaatcaaaagaatagaccgagatagggttgagtgttgttccagtttggaacaagagtccactattaaagaacgtggactccaacgtcaaagggcgaaaaaccgtctatcagggcgatggcccactacgtgaaccatcaccctaatcaagttttttggggtcgaggtgccgtaaagcactaaatcggaaccctaaagggagcccccgatttagagcttgacggggaaagccggcgaacgtggcgagaaaggaagggaagaaagcgaaaggagcgggcgctagggcgctggcaagtgtagcggtcacgctgcgcgtaaccaccacacccgccgcgcttaatgcgccgctacagggcgcgtcaggtg

SEQ ID NO: 3283 - DNA, 5135 bp, Artificial Sequence
  Synthetic Construct, AT-126 intein modified protein encoding nucleic acids in pBluescript
gcacttttcggggaaatgtgcgcggaacccctatttgtttatttttctaaatacattcaaatatgtatccgctcatgagacaataaccctgataaatgcttcaataatattgaaaaaggaagagtatgagtattcaacatttccgtgtcgcccttattcccttttttgcggcattttgccttcctgtttttgctcacccagaaacgctggtgaaagtaaaagatgctgaagatcagttgggtgcacgagtgggttacatcgaactggatctcaacagcggtaagatccttgagagttttcgccccgaagaacgttttccaatgatgagcacttttaaagttctgctatgtggcgcggtattatcccgtattgacgccgggcaagagcaactcggtcgccgcatacactattctcagaatgacttggttgagtactcaccagtcacagaaaagcatcttacggatggcatgacagtaagagaattatgcagtgctgccataaccatgagtgataacactgcggccaacttacttctgacaacgatcggaggaccgaaggagctaaccgcttttttgcacaacatgggggatcatgtaactcgccttgatcgttgggaaccggagctgaatgaagccataccaaacgacgagcgtgacaccacgatgcctgtagcaatggcaacaacgttgcgcaaactattaactggcgaactacttactctagcttcccggcaacaattaatagactggatggaggcggataaagttgcaggaccacttctgcgctcggcccttccggctggctggtttattgctgataaatctggagccggtgagcgtgggtctcgcggtatcattgcagcactggggccagatggtaagccctcccgtatcgtagttatctacacgacggggagtcaggcaactatggatgaacgaaatagacagatcgctgagataggtgcctcactgattaagcattggtaactgtcagaccaagtttactcatatatactttagattgatttaaaacttcatttttaatttaaaaggatctaggtgaagatcctttttgataatctcatgaccaaaatcccttaacgtgagttttcgttccactgagcgtcagaccccgtagaaaagatcaaaggatcttcttgagatcctttttttctgcgcgtaatctgctgcttgcaaacaaaaaaaccaccgctaccagcggtggtttgtttgccggatcaagagctaccaactctttttccgaaggtaactggcttcagcagagcgcagataccaaatactgtccttctagtgtagccgtagttaggccaccacttcaagaactctgtagcaccgcctacatacctcgctctgctaatcctgttaccagtggctgctgccagtggcgataagtcgtgtcttaccgggttggactcaagacgatagttaccggataaggcgcagcggtcgggctgaacggggggttcgtgcacacagcccagcttggagcgaacgacctacaccgaactgagatacctacagcgtgagctatgagaaagcgccacgcttcccgaagggagaaaggcggacaggtatccggtaagcggcagggtcggaacaggagagcgcacgagggagcttccagggggaaacgcctggtatctttatagtcctgtcgggtttcgccacctctgacttgagcgtcgatttttgtgatgctcgtcaggggggcggagcctatggaaaaacgccagcaacgcggcctttttacggttcctggccttttgctggccttttgctcacatgttctttcctgcgttatcccctgattctgtggataaccgtattaccgcctttgagtgagctgataccgctcgccgcagccgaacgaccgagcgcagcgagtcagtgagcgaggaagcggaagagcgcccaatacgcaaaccgcctctccccgcgcgttggccgattcattaatgcagctggcacgacaggtttcccgactggaaagcgggcagtgagcgcaacgcaattaatgtgagttagctcactcattaggcaccccaggctttacactttatgcttccggctcgtatgttgtgtggaattgtgagcggataacaatttcacacaggaaacagcatatgcaaacaagcattactctgacatccaacgcatccggtacgtttgacggttactattacgaactctggaaggatactggcaatacaacaatgacggtctacactcaaggtcgcttttcctgccagtggtcgaacatcaataacgcgttgtttaggaccgggaagaaatacaaccagaattggcagtctcttggcacaatccggatcacgtactctgcgacttacaacccaaacgggaactcctacttgtgtatctatggctggtctaccaacccattggtcgagttctacatcgttgagtcctgggggaactggagaccgcctggtgcctgcttctcgggggatactctcgtcgcgctgacagacgggcggtcggtttctttcgagcagctcgtggaggaggagaagcagggcaagcagaatttctgctacacaatccggcacgacggctcgattggggtggagaagatcattaatgctcgcaagacaaagactaacgccaaggttatcaaggtgacactcgacaacggcgagtctatcatttgcactcccgaccacaagttcatgctgagggatgggagctacaagtgcgccatggatctcacgctggacgattcgctcatgcctctgcatcgcaagatctcgaccacggaggactctggcatcaccattgatgggtacgagatggtgtggtccccgaggtccgacagctggctcttcacgcacctggtcgccgattggtacaaccggtggcagggcatctacattgcggaggagaagcagcattgccaccataaggacttcaataagcgcaacaataacccggataacctcatcaggctgtctcccgagaagcacctcgccctgcaccggaagcatatttcaaagacactccaccgcccagacgtggtcgagaagtgccgcaggatccatcagtcccctgagttccggcgcaagatgtcagcgaggatgcagtccccggagactcgggctatcctcagcaagcaggctcaggcccagtggcagaatgagacctacaagctgacgatgatggagtcgtggaggtctttctacgacagcaacgaggattacaggcagcagaatgctgagcagctcaacagggctcagcaggagtactgggctcaggctgagaacaggaccgctcaggctgagcgcgttaggcagcatttcgctcagaatccgggcctgcgccagcagtactcggagaacgcggtgaagcagtggaataaccccgagctcctgaagtggcggcagaagaagacaaaggagcagtggactccagagttccgcgagaagaggagggaggctctcgctcagacctactacaggaagacgctcgccgcgctgaagcaggtcgagatcgagaacgggtacctggacatttcagcctacgattcctaccgcatcagcaccaaggacaagtccctcctgcggttcgatcgcttctgcgagaggtacttcgagaatgacgagaacctcgcgcgcgaggctgtcctgaattacaaccacaggatcgtcaacattgaggcggtttccgagacgatcgacgtttacgacattgaggttccacatacgcataacttcgctctcgcttcaggggttttcgttcataatacgtccctgggccaagtgacaatcgatggcgggacctacgacatctataggacgacacgcgtcaaccagccttccattgtggggacagccacgttcgatcagtactggagcgtgcgcacctctaagcggacttcaggaacagtgaccgtgaccgatcacttccgcgcctgggcgaaccggggcctgaacctcggcacaatagaccaaattacattgtgcgtggagggttaccaaagctctggatcagccaacatcacccagaacaccttctctcagggctcttcttccggcagttcgggtggctcatccggctccacaacgactactcgcatcgagtgtgagaacatgtccttgtccggaccctacgttagcaggatcaccaatccctttaatggtattgcgctgtacgccaacggagacacagcccgcgctaccgttaacttccccgcaagtcgcaactacaatttccgcctgcggggttgcggcaacaacaataatcttgcccgtgtggacctgaggatcgacggacggaccgtcgggaccttttattaccagggcacatacccctgggaggccccaattgacaatgtttatgtcagtgcggggagtcatacagtcgaaatcactgttactgcggataacggcacatgggacgtgtatgccgactacctggtgatacagtgactcgagggggggcccggtacccaattcgccctatagtgagtcgtattacaattcactggccgtcgttttacaacgtcgtgactgggaaaaccctggcgttacccaacttaatcgccttgcagcacatccccctttcgccagctggcgtaatagcgaagaggcccgcaccgatcgcccttcccaacagttgcgcagcctgaatggcgaatggaaattgtaagcgttaatattttgttaaaattcgcgttaaatttttgttaaatcagctcattttttaaccaataggccgaaatcggcaaaatcccttataaatcaaaagaatagaccgagatagggttgagtgttgttccagtttggaacaagagtccactattaaagaacgtggactccaacgtcaaagggcgaaaaaccgtctatcagggcgatggcccactacgtgaaccatcaccctaatcaagttttttggggtcgaggtgccgtaaagcactaaatcggaaccctaaagggagcccccgatttagagcttgacggggaaagccggcgaacgtggcgagaaaggaagggaagaaagcgaaaggagcgggcgctagggcgctggcaagtgtagcggtcacgctgcgcgtaaccaccacacccgccgcgcttaatgcgccgctacagggcgcgtcaggtg

SEQ ID NO: 3284 - DNA, 5090 bp, Artificial Sequence
  Synthetic Construct, AT-127 intein modified protein encoding nucleic acids in pBluescript
gcacttttcggggaaatgtgcgcggaacccctatttgtttatttttctaaatacattcaaatatgtatccgctcatgagacaataaccctgataaatgcttcaataatattgaaaaaggaagagtatgagtattcaacatttccgtgtcgcccttattcccttttttgcggcattttgccttcctgtttttgctcacccagaaacgctggtgaaagtaaaagatgctgaagatcagttgggtgcacgagtgggttacatcgaactggatctcaacagcggtaagatccttgagagttttcgccccgaagaacgttttccaatgatgagcacttttaaagttctgctatgtggcgcggtattatcccgtattgacgccgggcaagagcaactcggtcgccgcatacactattctcagaatgacttggttgagtactcaccagtcacagaaaagcatcttacggatggcatgacagtaagagaattatgcagtgctgccataaccatgagtgataacactgcggccaacttacttctgacaacgatcggaggaccgaaggagctaaccgcttttttgcacaacatgggggatcatgtaactcgccttgatcgttgggaaccggagctgaatgaagccataccaaacgacgagcgtgacaccacgatgcctgtagcaatggcaacaacgttgcgcaaactattaactggcgaactacttactctagcttcccggcaacaattaatagactggatggaggcggataaagttgcaggaccacttctgcgctcggcccttccggctggctggtttattgctgataaatctggagccggtgagcgtgggtctcgcggtatcattgcagcactggggccagatggtaagccctcccgtatcgtagttatctacacgacggggagtcaggcaactatggatgaacgaaatagacagatcgctgagataggtgcctcactgattaagcattggtaactgtcagaccaagtttactcatatatactttagattgatttaaaacttcatttttaatttaaaaggatctaggtgaagatcctttttgataatctcatgaccaaaatcccttaacgtgagttttcgttccactgagcgtcagaccccgtagaaaagatcaaaggatcttcttgagatcctttttttctgcgcgtaatctgctgcttgcaaacaaaaaaaccaccgctaccagcggtggtttgtttgccggatcaagagctaccaactctttttccgaaggtaactggcttcagcagagcgcagataccaaatactgtccttctagtgtagccgtagttaggccaccacttcaagaactctgtagcaccgcctacatacctcgctctgctaatcctgttaccagtggctgctgccagtggcgataagtcgtgtcttaccgggttggactcaagacgatagttaccggataaggcgcagcggtcgggctgaacggggggttcgtgcacacagcccagcttggagcgaacgacctacaccgaactgagatacctacagcgtgagctatgagaaagcgccacgcttcccgaagggagaaaggcggacaggtatccggtaagcggcagggtcggaacaggagagcgcacgagggagcttccagggggaaacgcctggtatctttatagtcctgtcgggtttcgccacctctgacttgagcgtcgatttttgtgatgctcgtcaggggggcggagcctatggaaaaacgccagcaacgcggcctttttacggttcctggccttttgctggccttttgctcacatgttctttcctgcgttatcccctgattctgtggataaccgtattaccgcctttgagtgagctgataccgctcgccgcagccgaacgaccgagcgcagcgagtcagtgagcgaggaagcggaagagcgcccaatacgcaaaccgcctctccccgcgcgttggccgattcattaatgcagctggcacgacaggtttcccgactggaaagcgggcagtgagcgcaacgcaattaatgtgagttagctcactcattaggcaccccaggctttacactttatgcttccggctcgtatgttgtgtggaattgtgagcggataacaatttcacacaggaaacagcatatgcaaacaagcattactctgacatccaacgcatccggtacgtttgacggttactattacgaactctggaaggatactggcaatacaacaatgacggtctacactcaaggtcgcttttcctgccagtggtcgaacatcaataacgcgttgtttaggaccgggaagaaatacaaccagaattggcagtctcttggcacaatccggatcacgtactctgcgacttacaacccaaacgggaactcctacttgtgtatctatggctggtctaccaacccattggtcgagttctacatcgttgagtcctgggggaactggagaccgcctggtgcctgcatttctatggactctatgattctgacaactgagggctacaagtcgctgcaggagattttcgagacacagggggttaaggtggacaacaaggagaaggttatcgagctgaagtacccgctcattaatcggtacggcgacgtggagtacacctcccacttcacgaagaacggggagaagccaacaaagcgcatcaagactaataagggcattgagctggttaacacatacaatcatcctctcctggtgagggaggggttcaacctgatctggaagaagagcgaggacatcgaagtgggcgatattctcgtgtcccgcgtgggcgaccaccagttcgggaacaataacactgtggagaacgaggaggaggcttacgctctgggctgcatggtcgcggattcttacctggggtcatactcccggctcagcttctcgaacgacaagaaggagatcctcgataaggtctcaaagttctggaacaccttctccaataaggaggtttactacgacacctacaaggagtccaaggggatcacgattcacctgcatgacacaaacaagactaaggagttccatgataagtacaagatcgagtacggcgtcgctaaggacaagaagatcccgaagtgcattatggagagccccgagaacatccagctggccttcgtctcgggctacctggagtgcgagtccagcatctctgagaagaacctggaggttacctctgcttcaaaggacctcctgaaggatctccagctgatcctctcgaacatcggcattgtgtctacgaataaggagaaggtggtcaagaagtacaagcacaacaagtactaccggctgatcgtcaatcgcaaggagctcattaagctcctgccgctcctgaggttcgagacgcagcagcggaagaaccagaaggagaatttcctcagcaataacacaaagatcaagtcgtcttacggcaacactattgaggggtcacgctacctcctgaagaagtacagggactccctgaatatcgataagaaggagttctccaagtacctcagccgggacaccatcacgattgatcgcctgagggaggtcatctcgctctacccggacggcgataaggagattcgcgagctgttcgagaacgttgtgaataacaatatctactaccagaaggtggagcaggtcctggagggcgagatcattcccaccttcgacgtttgcatgcctaagactcattccttcatcgccaacacaatcgtcaaccacaacacgtccctgggccaagtgacaatcgatggcgggacctacgacatctataggacgacacgcgtcaaccagccttccattgtggggacagccacgttcgatcagtactggagcgtgcgcacctctaagcggacttcaggaacagtgaccgtgaccgatcacttccgcgcctgggcgaaccggggcctgaacctcggcacaatagaccaaattacattgtgcgtggagggttaccaaagctctggatcagccaacatcacccagaacaccttctctcagggctcttcttccggcagttcgggtggctcatccggctccacaacgactactcgcatcgagtgtgagaacatgtccttgtccggaccctacgttagcaggatcaccaatccctttaatggtattgcgctgtacgccaacggagacacagcccgcgctaccgttaacttccccgcaagtcgcaactacaatttccgcctgcggggttgcggcaacaacaataatcttgcccgtgtggacctgaggatcgacggacggaccgtcgggaccttttattaccagggcacatacccctgggaggccccaattgacaatgtttatgtcagtgcggggagtcatacagtcgaaatcactgttactgcggataacggcacatgggacgtgtatgccgactacctggtgatacagtgactcgagggggggcccggtacccaattcgccctatagtgagtcgtattacaattcactggccgtcgttttacaacgtcgtgactgggaaaaccctggcgttacccaacttaatcgccttgcagcacatccccctttcgccagctggcgtaatagcgaagaggcccgcaccgatcgcccttcccaacagttgcgcagcctgaatggcgaatggaaattgtaagcgttaatattttgttaaaattcgcgttaaatttttgttaaatcagctcattttttaaccaataggccgaaatcggcaaaatcccttataaatcaaaagaatagaccgagatagggttgagtgttgttccagtttggaacaagagtccactattaaagaacgtggactccaacgtcaaagggcgaaaaaccgtctatcagggcgatggcccactacgtgaaccatcaccctaatcaagttttttggggtcgaggtgccgtaaagcactaaatcggaaccctaaagggagcccccgatttagagcttgacggggaaagccggcgaacgtggcgagaaaggaagggaagaaagcgaaaggagcgggcgctagggcgctggcaagtgtagcggtcacgctgcgcgtaaccaccacacccgccgcgcttaatgcgccgctacagggcgcgtcaggtg

SEQ ID NO: 3285 - DNA, 4910 bp, Artificial Sequence
  Synthetic Construct, AT-128 intein modified protein encoding nucleic acids in pBluescript
gcacttttcggggaaatgtgcgcggaacccctatttgtttatttttctaaatacattcaaatatgtatccgctcatgagacaataaccctgataaatgcttcaataatattgaaaaaggaagagtatgagtattcaacatttccgtgtcgcccttattcccttttttgcggcattttgccttcctgtttttgctcacccagaaacgctggtgaaagtaaaagatgctgaagatcagttgggtgcacgagtgggttacatcgaactggatctcaacagcggtaagatccttgagagttttcgccccgaagaacgttttccaatgatgagcacttttaaagttctgctatgtggcgcggtattatcccgtattgacgccgggcaagagcaactcggtcgccgcatacactattctcagaatgacttggttgagtactcaccagtcacagaaaagcatcttacggatggcatgacagtaagagaattatgcagtgctgccataaccatgagtgataacactgcggccaacttacttctgacaacgatcggaggaccgaaggagctaaccgcttttttgcacaacatgggggatcatgtaactcgccttgatcgttgggaaccggagctgaatgaagccataccaaacgacgagcgtgacaccacgatgcctgtagcaatggcaacaacgttgcgcaaactattaactggcgaactacttactctagcttcccggcaacaattaatagactggatggaggcggataaagttgcaggaccacttctgcgctcggcccttccggctggctggtttattgctgataaatctggagccggtgagcgtgggtctcgcggtatcattgcagcactggggccagatggtaagccctcccgtatcgtagttatctacacgacggggagtcaggcaactatggatgaacgaaatagacagatcgctgagataggtgcctcactgattaagcattggtaactgtcagaccaagtttactcatatatactttagattgatttaaaacttcatttttaatttaaaaggatctaggtgaagatcctttttgataatctcatgaccaaaatcccttaacgtgagttttcgttccactgagcgtcagaccccgtagaaaagatcaaaggatcttcttgagatcctttttttctgcgcgtaatctgctgcttgcaaacaaaaaaaccaccgctaccagcggtggtttgtttgccggatcaagagctaccaactctttttccgaaggtaactggcttcagcagagcgcagataccaaatactgtccttctagtgtagccgtagttaggccaccacttcaagaactctgtagcaccgcctacatacctcgctctgctaatcctgttaccagtggctgctgccagtggcgataagtcgtgtcttaccgggttggactcaagacgatagttaccggataaggcgcagcggtcgggctgaacggggggttcgtgcacacagcccagcttggagcgaacgacctacaccgaactgagatacctacagcgtgagctatgagaaagcgccacgcttcccgaagggagaaaggcggacaggtatccggtaagcggcagggtcggaacaggagagcgcacgagggagcttccagggggaaacgcctggtatctttatagtcctgtcgggtttcgccacctctgacttgagcgtcgatttttgtgatgctcgtcaggggggcggagcctatggaaaaacgccagcaacgcggcctttttacggttcctggccttttgctggccttttgctcacatgttctttcctgcgttatcccctgattctgtggataaccgtattaccgcctttgagtgagctgataccgctcgccgcagccgaacgaccgagcgcagcgagtcagtgagcgaggaagcggaagagcgcccaatacgcaaaccgcctctccccgcgcgttggccgattcattaatgcagctggcacgacaggtttcccgactggaaagcgggcagtgagcgcaacgcaattaatgtgagttagctcactcattaggcaccccaggctttacactttatgcttccggctcgtatgttgtgtggaattgtgagcggataacaatttcacacaggaaacagcatatgcaaacaagcattactctgacatccaacgcatccggtacgtttgacggttactattacgaactctggaaggatactggcaatacaacaatgacggtctacactcaaggtcgcttttcctgccagtggtcgaacatcaataacgcgttgtttaggaccgggaagaaatacaaccagaattggcagtctcttggcacaatccggatcacgtactctgcgacttacaacccaaacgggaactcctacttgtgtatctatggctggtctaccaacccattggtcgagttctacatcgttgagtcctgggggaactggagaccgcctggtgcctgccatcctgcggacactaaggtcatcgtgaagggcaagggcatcgttaatatctcggacgtgaaggagggggactacattctcggcatcgacggctggcagcgggtcaagaaggtttggaagtaccactacgagggcaagctcatcaacattaatgggctgaagtgcacgccgaaccataaggttcccgtggtcacagagaatgacaggcagactcgcatcagggattccctcgccaagagcttcctgtcgggcaaggtcaaggggaagatcattaccacgaagctcttcgagaagatcgcggagttcgagaagaacaagccgtcggaggaggagatcctcaagggcgagctgtctgggatcattctggccgagggcaccctcctgaggaaggacatcgagtacttcgattccagccgggggaagaagcgcattagccaccagtaccgggtggagatcacgattggcgagaacgagaaggagctcctggagcggatcctctacattttcgacaagctgttcggcatccgcccatcggtgaagaagaagggggataccaacgcgctcaagatcacaactgctaagaaggccgtctacctgcagatcgaggagctcctgaagaatattgagtcactctacgcccctgcggttctgcgcggcttcttcgagagggacgctaccgtgaacaagatccgctctacgattgttgtgacccagggcacgaacaataagtggaagatcgacattgtcgcgaagctcctggattccctcggcatcccatacagccgctacgagtacaagtacattgagaatgggaaggagctcacaaagcatatcctggagattactggcagggatgggctcatcctgttccagacactcgtcggcttcatttcgtctgagaagaacgaggcgctggagaaggctatcgaggttagggagatgaaccggctcaagaacaattctttctacaatctgtcaaccttcgaggtgtcatccgagtactacaagggcgaggtctacgatctcactctggagggcaatccttactacttcgccaatggcatcctcacacataatacgtccctgggccaagtgacaatcgatggcgggacctacgacatctataggacgacacgcgtcaaccagccttccattgtggggacagccacgttcgatcagtactggagcgtgcgcacctctaagcggacttcaggaacagtgaccgtgaccgatcacttccgcgcctgggcgaaccggggcctgaacctcggcacaatagaccaaattacattgtgcgtggagggttaccaaagctctggatcagccaacatcacccagaacaccttctctcagggctcttcttccggcagttcgggtggctcatccggctccacaacgactactcgcatcgagtgtgagaacatgtccttgtccggaccctacgttagcaggatcaccaatccctttaatggtattgcgctgtacgccaacggagacacagcccgcgctaccgttaacttccccgcaagtcgcaactacaatttccgcctgcggggttgcggcaacaacaataatcttgcccgtgtggacctgaggatcgacggacggaccgtcgggaccttttattaccagggcacatacccctgggaggccccaattgacaatgtttatgtcagtgcggggagtcatacagtcgaaatcactgttactgcggataacggcacatgggacgtgtatgccgactacctggtgatacagtgactcgagggggggcccggtacccaattcgccctatagtgagtcgtattacaattcactggccgtcgttttacaacgtcgtgactgggaaaaccctggcgttacccaacttaatcgccttgcagcacatccccctttcgccagctggcgtaatagcgaagaggcccgcaccgatcgcccttcccaacagttgcgcagcctgaatggcgaatggaaattgtaagcgttaatattttgttaaaattcgcgttaaatttttgttaaatcagctcattttttaaccaataggccgaaatcggcaaaatcccttataaatcaaaagaatagaccgagatagggttgagtgttgttccagtttggaacaagagtccactattaaagaacgtggactccaacgtcaaagggcgaaaaaccgtctatcagggcgatggcccactacgtgaaccatcaccctaatcaagttttttggggtcgaggtgccgtaaagcactaaatcggaaccctaaagggagcccccgatttagagcttgacggggaaagccggcgaacgtggcgagaaaggaagggaagaaagcgaaaggagcgggcgctagggcgctggcaagtgtagcggtcacgctgcgcgtaaccaccacacccgccgcgcttaatgcgccgctacagggcgcgtcaggtg

SEQ ID NO: 3286 - DNA, 5444 bp, Artificial Sequence
  Synthetic Construct, AT-129 intein modified protein encoding nucleic acids in pBluescript
gcacttttcggggaaatgtgcgcggaacccctatttgtttatttttctaaatacattcaaatatgtatccgctcatgagacaataaccctgataaatgcttcaataatattgaaaaaggaagagtatgagtattcaacatttccgtgtcgcccttattcccttttttgcggcattttgccttcctgtttttgctcacccagaaacgctggtgaaagtaaaagatgctgaagatcagttgggtgcacgagtgggttacatcgaactggatctcaacagcggtaagatccttgagagttttcgccccgaagaacgttttccaatgatgagcacttttaaagttctgctatgtggcgcggtattatcccgtattgacgccgggcaagagcaactcggtcgccgcatacactattctcagaatgacttggttgagtactcaccagtcacagaaaagcatcttacggatggcatgacagtaagagaattatgcagtgctgccataaccatgagtgataacactgcggccaacttacttctgacaacgatcggaggaccgaaggagctaaccgcttttttgcacaacatgggggatcatgtaactcgccttgatcgttgggaaccggagctgaatgaagccataccaaacgacgagcgtgacaccacgatgcctgtagcaatggcaacaacgttgcgcaaactattaactggcgaactacttactctagcttcccggcaacaattaatagactggatggaggcggataaagttgcaggaccacttctgcgctcggcccttccggctggctggtttattgctgataaatctggagccggtgagcgtgggtctcgcggtatcattgcagcactggggccagatggtaagccctcccgtatcgtagttatctacacgacggggagtcaggcaactatggatgaacgaaatagacagatcgctgagataggtgcctcactgattaagcattggtaactgtcagaccaagtttactcatatatactttagattgatttaaaacttcatttttaatttaaaaggatctaggtgaagatcctttttgataatctcatgaccaaaatcccttaacgtgagttttcgttccactgagcgtcagaccccgtagaaaagatcaaaggatcttcttgagatcctttttttctgcgcgtaatctgctgcttgcaaacaaaaaaaccaccgctaccagcggtggtttgtttgccggatcaagagctaccaactctttttccgaaggtaactggcttcagcagagcgcagataccaaatactgtccttctagtgtagccgtagttaggccaccacttcaagaactctgtagcaccgcctacatacctcgctctgctaatcctgttaccagtggctgctgccagtggcgataagtcgtgtcttaccgggttggactcaagacgatagttaccggataaggcgcagcggtcgggctgaacggggggttcgtgcacacagcccagcttggagcgaacgacctacaccgaactgagatacctacagcgtgagctatgagaaagcgccacgcttcccgaagggagaaaggcggacaggtatccggtaagcggcagggtcggaacaggagagcgcacgagggagcttccagggggaaacgcctggtatctttatagtcctgtcgggtttcgccacctctgacttgagcgtcgatttttgtgatgctcgtcaggggggcggagcctatggaaaaacgccagcaacgcggcctttttacggttcctggccttttgctggccttttgctcacatgttctttcctgcgttatcccctgattctgtggataaccgtattaccgcctttgagtgagctgataccgctcgccgcagccgaacgaccgagcgcagcgagtcagtgagcgaggaagcggaagagcgcccaatacgcaaaccgcctctccccgcgcgttggccgattcattaatgcagctggcacgacaggtttcccgactggaaagcgggcagtgagcgcaacgcaattaatgtgagttagctcactcattaggcaccccaggctttacactttatgcttccggctcgtatgttgtgtggaattgtgagcggataacaatttcacacaggaaacagcatatgcaaacaagcattactctgacatccaacgcatccggtacgtttgacggttactattacgaactctggaaggatactggcaatacaacaatgacggtctacactcaaggtcgcttttcctgccagtggtcgaacatcaataacgcgttgtttaggaccgggaagaaatacaaccagaattggcagtctcttggcacaatccggatcacgtactctgcgacttacaacccaaacgggaactcctacttgtgtatctatggctggtctaccaacccattggtcgagttctacatcgttgagtcctgggggaactggagaccgcctggtgcctctatcctgcctaacgagtggctgcccatcatcgagaacggggaggtgaagttcgtgaagatcggggagttcattgatcgctacatggaggagcagaaggacaaggtgcgcacagtcgataacactgaggttctggaggtggacaatatcttcgccttctccctgaacaaggagtctaagaagtcagagatcaagaaggtgaaggccctcattcgccacaagtacaagggcgaggcgtacgaggtcgagctcaactccggccgcaagatccacattacaagggggcattctctcttcactatcaggaacggcaagatcaaggagatttggggcgaggaggttaaggtcggggacctcatcattgttccgaagaaggtgaagctgaatgagaaggaggctgtgatcaacattccagagctgatctctaagctccctgacgaggatacagccgacgtggtcatgaccacgcccgtcaagggcaggaagaatttcttcaaggggatgctccggaccctgaagtggatcttcggcgaggagtcaaagcggattcgcacgttcaacaggtacctcttccatctggaggagctcggcttcgtgaagctcctgccgaggggctacgaggtcaccgactgggagggcctgaagaggtaccggcagctgtacgagaagctcgtgaagaatctgcgctacaacggcaataagcgggagtacctggttcgcttcaacgacatcaaggattcagtgtcctgcttcccccgcaaggagctggaggagtggaagatcggcacaaggaaggggttccgcaggaagtgcattctcaaggttgacgaggatttcggcaagttcctggggtactacgtctcggagggctacgctggggctcagaagaacaagactggcgggatgagctactcggtcaagctctacaacgagaatccaaacgttctgaaggacatgaagaatatcgcggagaagttcttcggcaaggtccgggttgggaagaactgcgtggatattcctaagaagatggcttacctcctggctaagagcctgtgcggcgtcaccgctgagaacaagaggatcccgtcgatcattttcgactccagcgagcccgtgaggtgggcgttcctcagggcttacttcgtcggcgacggggatattcacccatccaagcgcctcaggctgtccacgaagagcgagctcctggccaatcagctcgtcttcctcctgaactcactgggcgtttcgtctatcaagattggcttcgactccggggtctaccgggtttacatcaacgaggatctgcctttcctccagacctcccgccagaagaatacgtactacccgaacctcatccccaaggaggtgctggaggagattttcggccgcaagttccagaagaacatcacgttcgagaagttcaaggagctcgcggacagcgggaagctggataagaggaaggtgaagctcctggacttcctcctgaatggcgacatcgtcctcgatcgggtgaagaacgtcgagaagcgcgagtacgagggctacgtgtacgatctctcagtggaggataatgagaatttcctcgtgggcttcggcctgctctacgctcataatacgtccctgggccaagtgacaatcgatggcgggacctacgacatctataggacgacacgcgtcaaccagccttccattgtggggacagccacgttcgatcagtactggagcgtgcgcacctctaagcggacttcaggaacagtgaccgtgaccgatcacttccgcgcctgggcgaaccggggcctgaacctcggcacaatagaccaaattacattgtgcgtggagggttaccaaagctctggatcagccaacatcacccagaacaccttctctcagggctcttcttccggcagttcgggtggctcatccggctccacaacgactactcgcatcgagtgtgagaacatgtccttgtccggaccctacgttagcaggatcaccaatccctttaatggtattgcgctgtacgccaacggagacacagcccgcgctaccgttaacttccccgcaagtcgcaactacaatttccgcctgcggggttgcggcaacaacaataatcttgcccgtgtggacctgaggatcgacggacggaccgtcgggaccttttattaccagggcacatacccctgggaggccccaattgacaatgtttatgtcagtgcggggagtcatacagtcgaaatcactgttactgcggataacggcacatgggacgtgtatgccgactacctggtgatacagtgactcgagggggggcccggtacccaattcgccctatagtgagtcgtattacaattcactggccgtcgttttacaacgtcgtgactgggaaaaccctggcgttacccaacttaatcgccttgcagcacatccccctttcgccagctggcgtaatagcgaagaggcccgcaccgatcgcccttcccaacagttgcgcagcctgaatggcgaatggaaattgtaagcgttaatattttgttaaaattcgcgttaaatttttgttaaatcagctcattttttaaccaataggccgaaatcggcaaaatcccttataaatcaaaagaatagaccgagatagggttgagtgttgttccagtttggaacaagagtccactattaaagaacgtggactccaacgtcaaagggcgaaaaaccgtctatcagggcgatggcccactacgtgaaccatcaccctaatcaagttttttggggtcgaggtgccgtaaagcactaaatcggaaccctaaagggagcccccgatttagagcttgacggggaaagccggcgaacgtggcgagaaaggaagggaagaaagcgaaaggagcgggcgctagggcgctggcaagtgtagcggtcacgctgcgcgtaaccaccacacccgccgcgcttaatgcgccgctacagggcgcgtcaggtg

SEQ ID NO: 3287 - DNA, 9788 bp, Artificial Sequence
  Synthetic Construct, AT-130 intein modified protein encoding nucleic acids in pBluescript
gcacttttcggggaaatgtgcgcggaacccctatttgtttatttttctaaatacattcaaatatgtatccgctcatgagacaataaccctgataaatgcttcaataatattgaaaaaggaagagtatgagtattcaacatttccgtgtcgcccttattcccttttttgcggcattttgccttcctgtttttgctcacccagaaacgctggtgaaagtaaaagatgctgaagatcagttgggtgcacgagtgggttacatcgaactggatctcaacagcggtaagatccttgagagttttcgccccgaagaacgttttccaatgatgagcacttttaaagttctgctatgtggcgcggtattatcccgtattgacgccgggcaagagcaactcggtcgccgcatacactattctcagaatgacttggttgagtactcaccagtcacagaaaagcatcttacggatggcatgacagtaagagaattatgcagtgctgccataaccatgagtgataacactgcggccaacttacttctgacaacgatcggaggaccgaaggagctaaccgcttttttgcacaacatgggggatcatgtaactcgccttgatcgttgggaaccggagctgaatgaagccataccaaacgacgagcgtgacaccacgatgcctgtagcaatggcaacaacgttgcgcaaactattaactggcgaactacttactctagcttcccggcaacaattaatagactggatggaggcggataaagttgcaggaccacttctgcgctcggcccttccggctggctggtttattgctgataaatctggagccggtgagcgtgggtctcgcggtatcattgcagcactggggccagatggtaagccctcccgtatcgtagttatctacacgacggggagtcaggcaactatggatgaacgaaatagacagatcgctgagataggtgcctcactgattaagcattggtaactgtcagaccaagtttactcatatatactttagattgatttaaaacttcatttttaatttaaaaggatctaggtgaagatcctttttgataatctcatgaccaaaatcccttaacgtgagttttcgttccactgagcgtcagaccccgtagaaaagatcaaaggatcttcttgagatcctttttttctgcgcgtaatctgctgcttgcaaacaaaaaaaccaccgctaccagcggtggtttgtttgccggatcaagagctaccaactctttttccgaaggtaactggcttcagcagagcgcagataccaaatactgtccttctagtgtagccgtagttaggccaccacttcaagaactctgtagcaccgcctacatacctcgctctgctaatcctgttaccagtggctgctgccagtggcgataagtcgtgtcttaccgggttggactcaagacgatagttaccggataaggcgcagcggtcgggctgaacggggggttcgtgcacacagcccagcttggagcgaacgacctacaccgaactgagatacctacagcgtgagctatgagaaagcgccacgcttcccgaagggagaaaggcggacaggtatccggtaagcggcagggtcggaacaggagagcgcacgagggagcttccagggggaaacgcctggtatctttatagtcctgtcgggtttcgccacctctgacttgagcgtcgatttttgtgatgctcgtcaggggggcggagcctatggaaaaacgccagcaacgcggcctttttacggttcctggccttttgctggccttttgctcacatgttctttcctgcgttatcccctgattctgtggataaccgtattaccgcctttgagtgagctgataccgctcgccgcagccgaacgaccgagcgcagcgagtcagtgagcgaggaagcggaagagcgcccaatacgcaaaccgcctctccccgcgcgttggccgattcattaatgcagctggcacgacaggtttcccgactggaaagcgggcagtgagcgcaacgcaattaatgtgagttagctcactcattaggcaccccaggctttacactttatgcttccggctcgtatgttgtgtggaattgtgagcggataacaatttcacacaggaaacagcatatgcaaacaagcattactctgacatccaacgcatccggtacgtttgacggttactattacgaactctggaaggatactggcaatacaacaatgacggtctacactcaaggtcgcttttcctgccagtggtcgaacatcaataacgcgttgtttaggaccgggaagaaatacaaccagaattggcagtctcttggcacaatccggatcacgtactctgcgacttacaacccaaacgggaactcctacttgtgtatctatggctggtctaccaacccattggtcgagttctacatcgttgagtcctgggggaactggagaccgcctggtgcctgcgcggcctacgatactctcgtgctgcagaaggacgggtcgctggttacgctggcggaggtttacaagcggcaggagattgagctgctcacactgggcaagaacagcaagttctacctcactaagccatcggccttcattgacgatggcatcaagcctattttccgcgtcaccacgaagctcgggaggttcgtggagacaactatcacccacccgttcctgaccgtgaacggctggaagcccctcagcaagctgcaggtcggggagaagattgccgtgccccgcaggctcaacattttcgggaatgagaccatctcggagtctaagttctccagcctgatcaacttcgacaatctctacctgttcccgctcgtgttccagctggagcggtcgcagctcgcgctgttcattcgctacctcttcagcctggatggctgggtgaagatctaccagaacaagatcgtctgcttcgggtactcaaccgtgtccgagaagctgatcaggcagattcagcacatcctcctgcggttcggcattgtctccgggatcgagaagttcgaggagaagcggacggagaagatcaaggtggtcaaggaggtgaagagccagcggtcgcaccgcgaggagttcacattcgctacttaccgcaactgctactgcgacggcaagtggcacctcaccattacggatgccctctcccagaagaacctgatggaggacatcggcgggttcgatagcaagaacttctacctgttcgacctcctgcagccgcacaacagcggcaatcaggagctggagaaccatctgatcttctgggatgagctcgttaatgtgctggcgaagttcgccgcgtctaagaaccagtcactcaagaatcgcaccgctaaggggaagtcccccaagaacagcgagaatctgaccacgacagagacgatttgcaggaagaacatcctcgccaacatggagaatctgccgagcgacaaccagaatttcgattcggagaagctcgacctgtctcagccccacaactcagggaaccaggagctggagaatcatctgatcttctgggacgagctcgtcaatgttctggccaagttcgcgacctcgaagaaccagtctctcaagaataggactaccaagcggaactcaccgaagaactccgagaatctgacgacaactgagaccatctgcaggaagaacattctggcgaacatggagaatctgccctctgataaccagaatttcgactcagagaagctcgatctgccgcagccccacaactccgggaatcaagaactggagaatcatctgatcttctgggacgaactcgtgaatgtcctggctaagttcgctgccagcaagaaccagtcgctcaagaatcgcaccacgaagaggaactctccaaagaactcagagaatctgacaactaccgagaccatttgccggaagaacattctggctaatatggagaatctgccttctgacaatcagaatttcgatagcgagaagctcgacctgccacagcctcataattccgggaatcaagagctggagaatcatctgatcttctgggacgaattagttaacgtgctggctaagttcgccacatccaagaaccagagcctcaagaaccggacgacaaagcgcaactcgccgaagaactctgagaatctgactaccacggagactatttgccgcaagaacattctggctaacatggagaatctgccatcggacaatcagaatttcgactctgagaagctcgatctgtcccagcctcacaacagcggcactcaggaactggagaaccatctgatcttctgggacgaactagtcaacgtcctcgccaagttcgcggcttcaaagaaccagtccctcaagaatcggacagcgaaggggaagagcccgaagaactcggagaatctgaccaccaccgagaccatctgccgcaagaacatcctcgcgaacatggaaaatctgccgtcagataatcagaatttcgattccgagaagctcgacctgtcgcagccccacaactctgggaatcaggaactggagaatcatctgatcttctgggacgaactggtgaacgtcctggcgaagttcgctacctctaagaaccagtccctgaagaataggacgacaaagcggaactccccgaagaacagcgaaaatctgaccactacggagaccatttgcaggaagaacattctcgcgaatatggagaatctgcccagcgataatcagaacttcgactcggagaagctggatctgcctcagccccacaactctggcaaccaagaactggagaaccatctgatcttctgggacgaacttgttaacgtgctggccaagttcgcgacatcgaagaaccaatccctgaaaaatcgcacaactaagaggaactcaccaaagaactccgaaaatctgactaccacagagactatttgccggaagaacatcctggccaatatggagaatctgccgtctgacaaccagaacttcgactccgagaagctggacctgccacagcctcacaacagcgggaatcaggagctggagaatcatctgatcttctgggacgaactagtaaacgttctggctaagttcgccactagcaagaaccaatccctcaagaatcggactaccaagcgcaactctccgaagaactcagaaaatctgaccaccactgagactatctgcaggaagaacatcctggcgaatatggaaaatctgccctccgataatcagaatttcgactccgagaagctcgatctgcctcagccgcataactctgggaatcaggagctggagaaccatctgatcttctgggacgaactagtgaatgtgctcgccaagttcgctacctccaagaaccaatccttaaagaataggaccacgaagcggaactcgccaaagaactctgaaaatctgaccacaaccgagaccatttgccgcaagaacatcctggccaacatggaaaatctgccttcggataatcagaacttcgattccgaaaaactggacctgccgcagccgcataattccgggaatcaggagctggagaaccatctgatcttctgggacgaactagttaatgtcctggccaagttcgcgacgtcaaagaaccagagcctgaagaatcgcacgacaaagaggaacagccctaagaactcggaaaatctgaccacaacggagacaatctgtaggaagaacattctggcaaatatggagaatctgccatcagacaatcagaacttcgacagcgagaagctcgatctgtcacagcctcacaactccggcacacaagaactggagaaccatctgatcttctgggacgaactagtaaatgttctcgccaagttcgcggcctctaagaaccaaagcctgaaaaatcggacaactaagcgcaactcccctaagaacagcgaaaatctgacaacgacagagacaatctgccgcaagaacattctcgcaaacatggaaaatctgccatctgataatcagaacttcgatagcgaaaaactggacctgccacagccacacaactccggcacgcaagaactggagaatcatctgatcttctgggacgaactagtaaacgtactggccaagttcgctgcgtcgaagaaccagtccttaaaaaaccgcaccactaagcggaactcacctaagaactccgaaaatctgaccacgactgagactatatgtaggaagaacatcttagccaacatggaaaatctgcccagcgacaatcaaaactttgactccgagaagctggatctgccgcagccgcataactccgggaatcaggagctggagaaccatctgatcttctgggacgaactagtaaacgtcctggctaagttcgccgctagcaagaaccagtccctgaaaaacaggactaccaagaggaactctcctaagaactcagaaaatctgactaccactgaaactatctgtcgcaagaacatcctggctaatatggaaaatctgccgtcggataaccagaacttcgattccgagaaactggacctgcctcagccgcacaattctggcaaccaagagctggagaaccatctgatcttctgggacgaactagtaaacgtgctcgccaagttcgccacctccaagaaccagtccctgaaaaataggaccacaaagcgcaactcgcctaagaactctgaaaatctgacaaccacggagacaatctgcaggaagaacatactcgcgaacatggagaatctgccttcggacaaccagaacttcgattcagagaagctggatctgccccagccgcataattccggcaaccaggaactggagaatcatctgatcttctgggacgaactagtaaacgtattagcgaagttcgctacctcaaagaaccaaagcctcaaaaataggacggccaaggggaagagccctaagaactcggagaatctgactaccactgagactatatgtcggaagaacatcctcgcaaacatggagaatctgcccagcgataaccagaatttcgattctgagaagctggacctgccgcagcctcataattctggtaaccaagagctggagaatcatctgatcttctgggacgaactagtaaacgtactagccaagttcgcgacctctaagaaccagagcctgaaaaaccgcaccaccaagcggaactccccaaagaacagcgaaaatctgactactaccgagacgatatgtcgcaagaacattctcgctaatatggaaaatctgccatcggacaaccaaaacttcgactccgaaaaactcgatctgccgcagccgcacaattccggtaaccaggagctggagaaccatctgatcttctgggacgaactagtaaacgtactcgctaagttcgccacttcgaagaaccagtcccttaaaaacaggaccaccaagaggaactcacccaagaactccgaaaatctgacgaccaccgaaaccatctgtaggaagaacatactggctaatatggaaaatctgccttctgacaaccagaatttcgacagtgaaaaactggacctgccccagccgcataactctggtaaccaagagctggagaatcatctgatcttctgggacgaactagtaaacgtacttgcgaagttcgctacaagcaagaaccagtccctcaaaaatcgcactgccaaggggaagtctccgaagaactcagagaatctgaccacgaccgagactatttgtaggaagaacatcctggccaacatggagaatctgcccagtgacaatcaaaactttgatagcgaaaaactggatctgccgcagccacacaactccgggaatcaggagctggagaaccacctgatcttctgggatgaactggttaacgttctcgcgaagttcgccacttccaagaaccagtccctcaaaaacaggaccactaagcgcaactcgccaaagaactctgagaatctgacgaccacagagacgatatgccgcaagaacattttagcgaatatggaaaatctgcccagcgacaatcagaactttgactccgaaaagctggacctgcctcagcctcataattctggaaaccaagaactggagaaccacctgatcttctgggacgaactagtaaacgtactagcaaagttcgccacctcaaagaaccagagcctgaaaaatcgcaccacaaagcggaacagcccaaagaactcggaaaatctgactactactgagacgatttgtcgcaagaacattttggcgaatatggagaatctgccaagcgataatcaaaacttcgattctgaaaaactcgatctgcctcagccacataattccggcacccaggagctggagaactccgacatcttctgggataagattgtgtccatcgagccggtcggggagaagcaggtgtacgatctcactgttccagagactcataacttcgttgctaatgatatttgcctccataatacgtccctgggccaagtgacaatcgatggcgggacctacgacatctataggacgacacgcgtcaaccagccttccattgtggggacagccacgttcgatcagtactggagcgtgcgcacctctaagcggacttcaggaacagtgaccgtgaccgatcacttccgcgcctgggcgaaccggggcctgaacctcggcacaatagaccaaattacattgtgcgtggagggttaccaaagctctggatcagccaacatcacccagaacaccttctctcagggctcttcttccggcagttcgggtggctcatccggctccacaacgactactcgcatcgagtgtgagaacatgtccttgtccggaccctacgttagcaggatcaccaatccctttaatggtattgcgctgtacgccaacggagacacagcccgcgctaccgttaacttccccgcaagtcgcaactacaatttccgcctgcggggttgcggcaacaacaataatcttgcccgtgtggacctgaggatcgacggacggaccgtcgggaccttttattaccagggcacatacccctgggaggccccaattgacaatgtttatgtcagtgcggggagtcatacagtcgaaatcactgttactgcggataacggcacatgggacgtgtatgccgactacctggtgatacagtgactcgagggggggcccggtacccaattcgccctatagtgagtcgtattacaattcactggccgtcgttttacaacgtcgtgactgggaaaaccctggcgttacccaacttaatcgccttgcagcacatccccctttcgccagctggcgtaatagcgaagaggcccgcaccgatcgcccttcccaacagttgcgcagcctgaatggcgaatggaaattgtaagcgttaatattttgttaaaattcgcgttaaatttttgttaaatcagctcattttttaaccaataggccgaaatcggcaaaatcccttataaatcaaaagaatagaccgagatagggttgagtgttgttccagtttggaacaagagtccactattaaagaacgtggactccaacgtcaaagggcgaaaaaccgtctatcagggcgatggcccactacgtgaaccatcaccctaatcaagttttttggggtcgaggtgccgtaaagcactaaatcggaaccctaaagggagcccccgatttagagcttgacggggaaagccggcgaacgtggcgagaaaggaagggaagaaagcgaaaggagcgggcgctagggcgctggcaagtgtagcggtcacgctgcgcgtaaccaccacacccgccgcgcttaatgcgccgctacagggcgcgtcaggtg

SEQ ID NO: 3288 - DNA, 5114 bp, Artificial Sequence
  Synthetic Construct, AT-131 intein modified protein encoding nucleic acids in pBluescript
gcacttttcggggaaatgtgcgcggaacccctatttgtttatttttctaaatacattcaaatatgtatccgctcatgagacaataaccctgataaatgcttcaataatattgaaaaaggaagagtatgagtattcaacatttccgtgtcgcccttattcccttttttgcggcattttgccttcctgtttttgctcacccagaaacgctggtgaaagtaaaagatgctgaagatcagttgggtgcacgagtgggttacatcgaactggatctcaacagcggtaagatccttgagagttttcgccccgaagaacgttttccaatgatgagcacttttaaagttctgctatgtggcgcggtattatcccgtattgacgccgggcaagagcaactcggtcgccgcatacactattctcagaatgacttggttgagtactcaccagtcacagaaaagcatcttacggatggcatgacagtaagagaattatgcagtgctgccataaccatgagtgataacactgcggccaacttacttctgacaacgatcggaggaccgaaggagctaaccgcttttttgcacaacatgggggatcatgtaactcgccttgatcgttgggaaccggagctgaatgaagccataccaaacgacgagcgtgacaccacgatgcctgtagcaatggcaacaacgttgcgcaaactattaactggcgaactacttactctagcttcccggcaacaattaatagactggatggaggcggataaagttgcaggaccacttctgcgctcggcccttccggctggctggtttattgctgataaatctggagccggtgagcgtgggtctcgcggtatcattgcagcactggggccagatggtaagccctcccgtatcgtagttatctacacgacggggagtcaggcaactatggatgaacgaaatagacagatcgctgagataggtgcctcactgattaagcattggtaactgtcagaccaagtttactcatatatactttagattgatttaaaacttcatttttaatttaaaaggatctaggtgaagatcctttttgataatctcatgaccaaaatcccttaacgtgagttttcgttccactgagcgtcagaccccgtagaaaagatcaaaggatcttcttgagatcctttttttctgcgcgtaatctgctgcttgcaaacaaaaaaaccaccgctaccagcggtggtttgtttgccggatcaagagctaccaactctttttccgaaggtaactggcttcagcagagcgcagataccaaatactgtccttctagtgtagccgtagttaggccaccacttcaagaactctgtagcaccgcctacatacctcgctctgctaatcctgttaccagtggctgctgccagtggcgataagtcgtgtcttaccgggttggactcaagacgatagttaccggataaggcgcagcggtcgggctgaacggggggttcgtgcacacagcccagcttggagcgaacgacctacaccgaactgagatacctacagcgtgagctatgagaaagcgccacgcttcccgaagggagaaaggcggacaggtatccggtaagcggcagggtcggaacaggagagcgcacgagggagcttccagggggaaacgcctggtatctttatagtcctgtcgggtttcgccacctctgacttgagcgtcgatttttgtgatgctcgtcaggggggcggagcctatggaaaaacgccagcaacgcggcctttttacggttcctggccttttgctggccttttgctcacatgttctttcctgcgttatcccctgattctgtggataaccgtattaccgcctttgagtgagctgataccgctcgccgcagccgaacgaccgagcgcagcgagtcagtgagcgaggaagcggaagagcgcccaatacgcaaaccgcctctccccgcgcgttggccgattcattaatgcagctggcacgacaggtttcccgactggaaagcgggcagtgagcgcaacgcaattaatgtgagttagctcactcattaggcaccccaggctttacactttatgcttccggctcgtatgttgtgtggaattgtgagcggataacaatttcacacaggaaacagcatatgcaaacaagcattactctgacatccaacgcatccggtacgtttgacggttactattacgaactctggaaggatactggcaatacaacaatgacggtctacactcaaggtcgcttttcctgccagtggtcgaacatcaataacgcgttgtttaggaccgggaagaaatacaaccagaattggcagtctcttggcacaatccggatcacgtactctgcgacttacaacccaaacgggaactcctacttgtgtatctatggctggtctaccaacccattggtcgagttctacatcgttgagtcctgggggaactggagaccgcctggtgcctgcctctcggggtctacaaaggtcattgacgctgctacggggaatctcttctcgctcaaggagatcgccgctcagcctgagtactggctctcgcgcaaggtcttctctctcgacctgaagtcacagcaggtggtccagcagccaatcaccgagattcaccctaatggcgtgagggatgtctggcagatcaccacgaggaccaacaggaaggtgtgcgctacggacgatcatctcttctacacagtcctgggctggaagccgctcaaggacttcagcgttggcgatcgcctcgggctgccgaataagatccccattaactacaggtcccagatctccgacagcaaggtgaagttcacggcgtacctcattggcgaggggtacctgtacacaaattcgttctcttgctcatacttctgcaactccgacggggagctcatcgcggatttctacggctgcgctgaggagctgttcgggtccagcgctccaatcgagaagcagctccacctgggcaataagtccgtgatctacgtgcggatcggcctcatttccgggctgaagaactgggtcgactcctacctccagtgcgcgaatagccgcgtgcaggagatccccaactggattttctccctcagccagtcgcagctccagctgttcctcggcatcctgtggtctacgtcagggatcttcgacgagacaattggctacacttactactcgtctaacagcgaggtcctggttaggcaggtccagcatctgttcctccggctgggcatcgtttccctcttcaacgtcaataaggttaagggccagggggagctggacgtgtcctacgttgtggaggtccgcgggagggaggatatgctgaagttctacaagctcatcaagccgtacctgtcatcctacaagcagggcctctgcgagagctgctacctggtcattaagtaccagcagtcgtaccagttcaagtacttcctcactcccgacttcttcgatctgatcgtgaaggctaagaaggccagctcgatgaccagggctctcggcgtttgcggcggggagatctcttcagtgtggaacttccagaatacatctaaccggtccctgagcttcgacaagttcaacaatttctcgactgtcctcgcggatgaggagctgaccgccatcgcgaactcggacgtgttctgggatgagatcatttctatcgagtacattggcaaggaggaggtgttcgatctcactattccagagactcataacttcattgctaatgacttcatcgtgcataatacgtccctgggccaagtgacaatcgatggcgggacctacgacatctataggacgacacgcgtcaaccagccttccattgtggggacagccacgttcgatcagtactggagcgtgcgcacctctaagcggacttcaggaacagtgaccgtgaccgatcacttccgcgcctgggcgaaccggggcctgaacctcggcacaatagaccaaattacattgtgcgtggagggttaccaaagctctggatcagccaacatcacccagaacaccttctctcagggctcttcttccggcagttcgggtggctcatccggctccacaacgactactcgcatcgagtgtgagaacatgtccttgtccggaccctacgttagcaggatcaccaatccctttaatggtattgcgctgtacgccaacggagacacagcccgcgctaccgttaacttccccgcaagtcgcaactacaatttccgcctgcggggttgcggcaacaacaataatcttgcccgtgtggacctgaggatcgacggacggaccgtcgggaccttttattaccagggcacatacccctgggaggccccaattgacaatgtttatgtcagtgcggggagtcatacagtcgaaatcactgttactgcggataacggcacatgggacgtgtatgccgactacctggtgatacagtgactcgagggggggcccggtacccaattcgccctatagtgagtcgtattacaattcactggccgtcgttttacaacgtcgtgactgggaaaaccctggcgttacccaacttaatcgccttgcagcacatccccctttcgccagctggcgtaatagcgaagaggcccgcaccgatcgcccttcccaacagttgcgcagcctgaatggcgaatggaaattgtaagcgttaatattttgttaaaattcgcgttaaatttttgttaaatcagctcattttttaaccaataggccgaaatcggcaaaatcccttataaatcaaaagaatagaccgagatagggttgagtgttgttccagtttggaacaagagtccactattaaagaacgtggactccaacgtcaaagggcgaaaaaccgtctatcagggcgatggcccactacgtgaaccatcaccctaatcaagttttttggggtcgaggtgccgtaaagcactaaatcggaaccctaaagggagcccccgatttagagcttgacggggaaagccggcgaacgtggcgagaaaggaagggaagaaagcgaaaggagcgggcgctagggcgctggcaagtgtagcggtcacgctgcgcgtaaccaccacacccgccgcgcttaatgcgccgctacagggcgcgtcaggtg

SEQ ID NO: 3289 - DNA, 4241 bp, Artificial Sequence
  Synthetic Construct, AT-132 intein modified protein encoding nucleic acids in pBluescript
gcacttttcggggaaatgtgcgcggaacccctatttgtttatttttctaaatacattcaaatatgtatccgctcatgagacaataaccctgataaatgcttcaataatattgaaaaaggaagagtatgagtattcaacatttccgtgtcgcccttattcccttttttgcggcattttgccttcctgtttttgctcacccagaaacgctggtgaaagtaaaagatgctgaagatcagttgggtgcacgagtgggttacatcgaactggatctcaacagcggtaagatccttgagagttttcgccccgaagaacgttttccaatgatgagcacttttaaagttctgctatgtggcgcggtattatcccgtattgacgccgggcaagagcaactcggtcgccgcatacactattctcagaatgacttggttgagtactcaccagtcacagaaaagcatcttacggatggcatgacagtaagagaattatgcagtgctgccataaccatgagtgataacactgcggccaacttacttctgacaacgatcggaggaccgaaggagctaaccgcttttttgcacaacatgggggatcatgtaactcgccttgatcgttgggaaccggagctgaatgaagccataccaaacgacgagcgtgacaccacgatgcctgtagcaatggcaacaacgttgcgcaaactattaactggcgaactacttactctagcttcccggcaacaattaatagactggatggaggcggataaagttgcaggaccacttctgcgctcggcccttccggctggctggtttattgctgataaatctggagccggtgagcgtgggtctcgcggtatcattgcagcactggggccagatggtaagccctcccgtatcgtagttatctacacgacggggagtcaggcaactatggatgaacgaaatagacagatcgctgagataggtgcctcactgattaagcattggtaactgtcagaccaagtttactcatatatactttagattgatttaaaacttcatttttaatttaaaaggatctaggtgaagatcctttttgataatctcatgaccaaaatcccttaacgtgagttttcgttccactgagcgtcagaccccgtagaaaagatcaaaggatcttcttgagatcctttttttctgcgcgtaatctgctgcttgcaaacaaaaaaaccaccgctaccagcggtggtttgtttgccggatcaagagctaccaactctttttccgaaggtaactggcttcagcagagcgcagataccaaatactgtccttctagtgtagccgtagttaggccaccacttcaagaactctgtagcaccgcctacatacctcgctctgctaatcctgttaccagtggctgctgccagtggcgataagtcgtgtcttaccgggttggactcaagacgatagttaccggataaggcgcagcggtcgggctgaacggggggttcgtgcacacagcccagcttggagcgaacgacctacaccgaactgagatacctacagcgtgagctatgagaaagcgccacgcttcccgaagggagaaaggcggacaggtatccggtaagcggcagggtcggaacaggagagcgcacgagggagcttccagggggaaacgcctggtatctttatagtcctgtcgggtttcgccacctctgacttgagcgtcgatttttgtgatgctcgtcaggggggcggagcctatggaaaaacgccagcaacgcggcctttttacggttcctggccttttgctggccttttgctcacatgttctttcctgcgttatcccctgattctgtggataaccgtattaccgcctttgagtgagctgataccgctcgccgcagccgaacgaccgagcgcagcgagtcagtgagcgaggaagcggaagagcgcccaatacgcaaaccgcctctccccgcgcgttggccgattcattaatgcagctggcacgacaggtttcccgactggaaagcgggcagtgagcgcaacgcaattaatgtgagttagctcactcattaggcaccccaggctttacactttatgcttccggctcgtatgttgtgtggaattgtgagcggataacaatttcacacaggaaacagcatatgcaaacaagcattactctgacatccaacgcatccggtacgtttgacggttactattacgaactctggaaggatactggcaatacaacaatgacggtctacactcaaggtcgcttttcctgccagtggtcgaacatcaataacgcgttgtttaggaccgggaagaaatacaaccagaattggcagtctcttggcacaatccggatcacgtactctgcgacttacaacccaaacgggaactcctacttgtgtatctatggctggtctaccaacccattggtcgagttctacatcgttgagtcctgggggaactggagaccgcctggtgcctgcctgacttacgagacagagattatgacagtggagtacgggccgctgcctatcgggaagatcgtggagtaccgcattgagtgcacggtgtacacagtcgacaagaacggctacatctacactcagccgattgcccagtggcacaatcgcggcatgcaggaggtctacgagtactccctggaggatgggaccgttatcagggcgacgccggagcataagttcatgaccgaggacggccagatgctgcccatcgatgagattttcgagcggaacctcgacctgaagtgcctcgggaccctggagatggttaagattgtgagccgcaagctcgctaagacggagaatgtgtacgatattggggttacaaaggatcacaacttcgtgctcgctaatgggctcattgcttccaacacgtccctgggccaagtgacaatcgatggcgggacctacgacatctataggacgacacgcgtcaaccagccttccattgtggggacagccacgttcgatcagtactggagcgtgcgcacctctaagcggacttcaggaacagtgaccgtgaccgatcacttccgcgcctgggcgaaccggggcctgaacctcggcacaatagaccaaattacattgtgcgtggagggttaccaaagctctggatcagccaacatcacccagaacaccttctctcagggctcttcttccggcagttcgggtggctcatccggctccacaacgactactcgcatcgagtgtgagaacatgtccttgtccggaccctacgttagcaggatcaccaatccctttaatggtattgcgctgtacgccaacggagacacagcccgcgctaccgttaacttccccgcaagtcgcaactacaatttccgcctgcggggttgcggcaacaacaataatcttgcccgtgtggacctgaggatcgacggacggaccgtcgggaccttttattaccagggcacatacccctgggaggccccaattgacaatgtttatgtcagtgcggggagtcatacagtcgaaatcactgttactgcggataacggcacatgggacgtgtatgccgactacctggtgatacagtgactcgagggggggcccggtacccaattcgccctatagtgagtcgtattacaattcactggccgtcgttttacaacgtcgtgactgggaaaaccctggcgttacccaacttaatcgccttgcagcacatccccctttcgccagctggcgtaatagcgaagaggcccgcaccgatcgcccttcccaacagttgcgcagcctgaatggcgaatggaaattgtaagcgttaatattttgttaaaattcgcgttaaatttttgttaaatcagctcattttttaaccaataggccgaaatcggcaaaatcccttataaatcaaaagaatagaccgagatagggttgagtgttgttccagtttggaacaagagtccactattaaagaacgtggactccaacgtcaaagggcgaaaaaccgtctatcagggcgatggcccactacgtgaaccatcaccctaatcaagttttttggggtcgaggtgccgtaaagcactaaatcggaaccctaaagggagcccccgatttagagcttgacggggaaagccggcgaacgtggcgagaaaggaagggaagaaagcgaaaggagcgggcgctagggcgctggcaagtgtagcggtcacgctgcgcgtaaccaccacacccgccgcgcttaatgcgccgctacagggcgcgtcaggtg

SEQ ID NO: 3290 - DNA, 5120 bp, Artificial Sequence
  Synthetic Construct, AT-133 intein modified protein encoding nucleic acids in pBluescript
gcacttttcggggaaatgtgcgcggaacccctatttgtttatttttctaaatacattcaaatatgtatccgctcatgagacaataaccctgataaatgcttcaataatattgaaaaaggaagagtatgagtattcaacatttccgtgtcgcccttattcccttttttgcggcattttgccttcctgtttttgctcacccagaaacgctggtgaaagtaaaagatgctgaagatcagttgggtgcacgagtgggttacatcgaactggatctcaacagcggtaagatccttgagagttttcgccccgaagaacgttttccaatgatgagcacttttaaagttctgctatgtggcgcggtattatcccgtattgacgccgggcaagagcaactcggtcgccgcatacactattctcagaatgacttggttgagtactcaccagtcacagaaaagcatcttacggatggcatgacagtaagagaattatgcagtgctgccataaccatgagtgataacactgcggccaacttacttctgacaacgatcggaggaccgaaggagctaaccgcttttttgcacaacatgggggatcatgtaactcgccttgatcgttgggaaccggagctgaatgaagccataccaaacgacgagcgtgacaccacgatgcctgtagcaatggcaacaacgttgcgcaaactattaactggcgaactacttactctagcttcccggcaacaattaatagactggatggaggcggataaagttgcaggaccacttctgcgctcggcccttccggctggctggtttattgctgataaatctggagccggtgagcgtgggtctcgcggtatcattgcagcactggggccagatggtaagccctcccgtatcgtagttatctacacgacggggagtcaggcaactatggatgaacgaaatagacagatcgctgagataggtgcctcactgattaagcattggtaactgtcagaccaagtttactcatatatactttagattgatttaaaacttcatttttaatttaaaaggatctaggtgaagatcctttttgataatctcatgaccaaaatcccttaacgtgagttttcgttccactgagcgtcagaccccgtagaaaagatcaaaggatcttcttgagatcctttttttctgcgcgtaatctgctgcttgcaaacaaaaaaaccaccgctaccagcggtggtttgtttgccggatcaagagctaccaactctttttccgaaggtaactggcttcagcagagcgcagataccaaatactgtccttctagtgtagccgtagttaggccaccacttcaagaactctgtagcaccgcctacatacctcgctctgctaatcctgttaccagtggctgctgccagtggcgataagtcgtgtcttaccgggttggactcaagacgatagttaccggataaggcgcagcggtcgggctgaacggggggttcgtgcacacagcccagcttggagcgaacgacctacaccgaactgagatacctacagcgtgagctatgagaaagcgccacgcttcccgaagggagaaaggcggacaggtatccggtaagcggcagggtcggaacaggagagcgcacgagggagcttccagggggaaacgcctggtatctttatagtcctgtcgggtttcgccacctctgacttgagcgtcgatttttgtgatgctcgtcaggggggcggagcctatggaaaaacgccagcaacgcggcctttttacggttcctggccttttgctggccttttgctcacatgttctttcctgcgttatcccctgattctgtggataaccgtattaccgcctttgagtgagctgataccgctcgccgcagccgaacgaccgagcgcagcgagtcagtgagcgaggaagcggaagagcgcccaatacgcaaaccgcctctccccgcgcgttggccgattcattaatgcagctggcacgacaggtttcccgactggaaagcgggcagtgagcgcaacgcaattaatgtgagttagctcactcattaggcaccccaggctttacactttatgcttccggctcgtatgttgtgtggaattgtgagcggataacaatttcacacaggaaacagcatatgcaaacaagcattactctgacatccaacgcatccggtacgtttgacggttactattacgaactctggaaggatactggcaatacaacaatgacggtctacactcaaggtcgcttttcctgccagtggtcgaacatcaataacgcgttgtttaggaccgggaagaaatacaaccagaattggcagtctcttggcacaatccggatcacgtactctgcgacttacaacccaaacgggaactcctacttgtgtatctatggctggtctaccaacccattggtcgagttctacatcgttgagtcctgggggaactggagaccgcctggtgcctcgctgacgggggatcagaaggtcctctactacatcgctaagaagctctactacgagacattcgctgagtgctacgaccgcattaacggcgacatctccagcgttagcgtgccatgcttcgatgagaactaccagacagtgattaagcctatctcggccatttggaagcaccatgtgaagaagaagggcttcaagattaagatcacttgggggaagcagattaagatcacagaggaccacagcctgttcactaggaacgagaacaataagccgcaggcggttttcggcaatgagatcaaggtcggcgatgagattgggatcccctcctacatctccttcctggagcagccgctggagcccttccatattaccgacaagattctcatccaggaggagatctacgtggagtcagaggacacgatctcctacattgagaagtacggcgataagatgcgggagtacctcctggcgaagtcgctgtctccgtcacagttctactccattctcaagacatacgaggctaagaaccagatcccgtggcacctgtggaagtacctggagctgcccctctccgagaaggacaaggtctgctacctcagcaagaaggccattaagaactggatcgataatgtcgaggagctcctgtggttcctgggcttctacgttgccaggggctcactgatcaagaacgaggtggtcctcaagggcgagccatcccagctggagaaggtcatcgagctcattgagaggatcttcgagtacaagagcgagatcaatgactcgggctacatttcgatcaagtctaagattctcgttgatctgatcggctacgggctcaacttcgggaatcaggagaaggacattccaaactggatcctgcagctccctgagcagcagctcatccggttcctgaagggcttcgtggctgggaacaacctggagaaccagctgaatttctacctggagttcaagacggactctcagctggtggcggagaagctggtcctcatcctgtcgaagttcggcctcgtcgctgacgtttctgagatcgaggttaacgaggaggatattgccaagatctaccgcatcattatcgagggcctggaggacaagaacatccataatctctctaaggtggagcagaagatttcagctctgaccacgggcgatatcgcttgggggaagattgagtccatcgaggagttcgagatcgacgattacgtctacgacttctctgttccaaactacgagaacttcatcgggggctcttacaatgttttcgctcataacacgtccctgggccaagtgacaatcgatggcgggacctacgacatctataggacgacacgcgtcaaccagccttccattgtggggacagccacgttcgatcagtactggagcgtgcgcacctctaagcggacttcaggaacagtgaccgtgaccgatcacttccgcgcctgggcgaaccggggcctgaacctcggcacaatagaccaaattacattgtgcgtggagggttaccaaagctctggatcagccaacatcacccagaacaccttctctcagggctcttcttccggcagttcgggtggctcatccggctccacaacgactactcgcatcgagtgtgagaacatgtccttgtccggaccctacgttagcaggatcaccaatccctttaatggtattgcgctgtacgccaacggagacacagcccgcgctaccgttaacttccccgcaagtcgcaactacaatttccgcctgcggggttgcggcaacaacaataatcttgcccgtgtggacctgaggatcgacggacggaccgtcgggaccttttattaccagggcacatacccctgggaggccccaattgacaatgtttatgtcagtgcggggagtcatacagtcgaaatcactgttactgcggataacggcacatgggacgtgtatgccgactacctggtgatacagtgactcgagggggggcccggtacccaattcgccctatagtgagtcgtattacaattcactggccgtcgttttacaacgtcgtgactgggaaaaccctggcgttacccaacttaatcgccttgcagcacatccccctttcgccagctggcgtaatagcgaagaggcccgcaccgatcgcccttcccaacagttgcgcagcctgaatggcgaatggaaattgtaagcgttaatattttgttaaaattcgcgttaaatttttgttaaatcagctcattttttaaccaataggccgaaatcggcaaaatcccttataaatcaaaagaatagaccgagatagggttgagtgttgttccagtttggaacaagagtccactattaaagaacgtggactccaacgtcaaagggcgaaaaaccgtctatcagggcgatggcccactacgtgaaccatcaccctaatcaagttttttggggtcgaggtgccgtaaagcactaaatcggaaccctaaagggagcccccgatttagagcttgacggggaaagccggcgaacgtggcgagaaaggaagggaagaaagcgaaaggagcgggcgctagggcgctggcaagtgtagcggtcacgctgcgcgtaaccaccacacccgccgcgcttaatgcgccgctacagggcgcgtcaggtg

SEQ ID NO: 3291 - DNA, 4799 bp, Artificial Sequence
  Synthetic Construct, AT-134 intein modified protein encoding nucleic acids in pBluescript
gcacttttcggggaaatgtgcgcggaacccctatttgtttatttttctaaatacattcaaatatgtatccgctcatgagacaataaccctgataaatgcttcaataatattgaaaaaggaagagtatgagtattcaacatttccgtgtcgcccttattcccttttttgcggcattttgccttcctgtttttgctcacccagaaacgctggtgaaagtaaaagatgctgaagatcagttgggtgcacgagtgggttacatcgaactggatctcaacagcggtaagatccttgagagttttcgccccgaagaacgttttccaatgatgagcacttttaaagttctgctatgtggcgcggtattatcccgtattgacgccgggcaagagcaactcggtcgccgcatacactattctcagaatgacttggttgagtactcaccagtcacagaaaagcatcttacggatggcatgacagtaagagaattatgcagtgctgccataaccatgagtgataacactgcggccaacttacttctgacaacgatcggaggaccgaaggagctaaccgcttttttgcacaacatgggggatcatgtaactcgccttgatcgttgggaaccggagctgaatgaagccataccaaacgacgagcgtgacaccacgatgcctgtagcaatggcaacaacgttgcgcaaactattaactggcgaactacttactctagcttcccggcaacaattaatagactggatggaggcggataaagttgcaggaccacttctgcgctcggcccttccggctggctggtttattgctgataaatctggagccggtgagcgtgggtctcgcggtatcattgcagcactggggccagatggtaagccctcccgtatcgtagttatctacacgacggggagtcaggcaactatggatgaacgaaatagacagatcgctgagataggtgcctcactgattaagcattggtaactgtcagaccaagtttactcatatatactttagattgatttaaaacttcatttttaatttaaaaggatctaggtgaagatcctttttgataatctcatgaccaaaatcccttaacgtgagttttcgttccactgagcgtcagaccccgtagaaaagatcaaaggatcttcttgagatcctttttttctgcgcgtaatctgctgcttgcaaacaaaaaaaccaccgctaccagcggtggtttgtttgccggatcaagagctaccaactctttttccgaaggtaactggcttcagcagagcgcagataccaaatactgtccttctagtgtagccgtagttaggccaccacttcaagaactctgtagcaccgcctacatacctcgctctgctaatcctgttaccagtggctgctgccagtggcgataagtcgtgtcttaccgggttggactcaagacgatagttaccggataaggcgcagcggtcgggctgaacggggggttcgtgcacacagcccagcttggagcgaacgacctacaccgaactgagatacctacagcgtgagctatgagaaagcgccacgcttcccgaagggagaaaggcggacaggtatccggtaagcggcagggtcggaacaggagagcgcacgagggagcttccagggggaaacgcctggtatctttatagtcctgtcgggtttcgccacctctgacttgagcgtcgatttttgtgatgctcgtcaggggggcggagcctatggaaaaacgccagcaacgcggcctttttacggttcctggccttttgctggccttttgctcacatgttctttcctgcgttatcccctgattctgtggataaccgtattaccgcctttgagtgagctgataccgctcgccgcagccgaacgaccgagcgcagcgagtcagtgagcgaggaagcggaagagcgcccaatacgcaaaccgcctctccccgcgcgttggccgattcattaatgcagctggcacgacaggtttcccgactggaaagcgggcagtgagcgcaacgcaattaatgtgagttagctcactcattaggcaccccaggctttacactttatgcttccggctcgtatgttgtgtggaattgtgagcggataacaatttcacacaggaaacagcatatgcaaacaagcattactctgacatccaacgcatccggtacgtttgacggttactattacgaactctggaaggatactggcaatacaacaatgacggtctacactcaaggtcgcttttcctgccagtggtcgaacatcaataacgcgttgtttaggaccgggaagaaatacaaccagaattggcagtctcttggcacaatccggatcacgtactctgcgacttacaacccaaacgggaactcctacttgtgtatctatggctggtctaccaacccattggtcgagttctacatcgttgagtcctgggggaactggagaccgcctggtgcctgcgtttcgggggatacgctgctgattacaagggactctattcataagattaaggatgtcgtggggcagaagattgagatttggaatggcaagaactggtctcaggtcatcccgctgaagacagggaaggacaggaagctctaccgggttcgcttcggcgacgggtcgtacctggatgttaccgagtaccaccgcttcttcgtgaaggacaggttcggcaagaagtacgaggaggtgcagaccaaggatctcctgacgcactccaagtacgccctggacgtcgagccattcatcattgattaccatgacggcgattcgatcaacctctcttacgcttacacactgggggctgctctcggcaatgggactatcgaccagaactctaatggcaagattagggtgtactcacataaggccgagctgatcttcgcgggcaacaagtccctggagcggcagtacaattacctcccgagcttcgtggacgtcattgatctcggcttctcgggggagctcctgaggaggctgcagaccgagcccgacgctctcaacacgatcgcctcatggaataagtccgctatcctggccttcattgcgggcctcgctgacacagatgggagcgagactaagggcaacgggatcaagatttccgtgagcgactacgagagggccaagcggctgcagctcctgctcacgaagtgcggcattagggcgagcgtcaatctgatggcttcgcggggctgcaccacgaacctcggggagcgcaatcaggacctgtactacctccagatcaccgattgccgggagattccatgccagcgcctcgacacaactaaggtttgcgaggcgaagttccagggcaagtaccagaccatccagaacgtcgaggagctgcctggcctccacgatacgtactgcttcgaggagccagagttccacaagggggttttcggcaatgctctcacaggcaacacgtccctgggccaagtgacaatcgatggcgggacctacgacatctataggacgacacgcgtcaaccagccttccattgtggggacagccacgttcgatcagtactggagcgtgcgcacctctaagcggacttcaggaacagtgaccgtgaccgatcacttccgcgcctgggcgaaccggggcctgaacctcggcacaatagaccaaattacattgtgcgtggagggttaccaaagctctggatcagccaacatcacccagaacaccttctctcagggctcttcttccggcagttcgggtggctcatccggctccacaacgactactcgcatcgagtgtgagaacatgtccttgtccggaccctacgttagcaggatcaccaatccctttaatggtattgcgctgtacgccaacggagacacagcccgcgctaccgttaacttccccgcaagtcgcaactacaatttccgcctgcggggttgcggcaacaacaataatcttgcccgtgtggacctgaggatcgacggacggaccgtcgggaccttttattaccagggcacatacccctgggaggccccaattgacaatgtttatgtcagtgcggggagtcatacagtcgaaatcactgttactgcggataacggcacatgggacgtgtatgccgactacctggtgatacagtgactcgagggggggcccggtacccaattcgccctatagtgagtcgtattacaattcactggccgtcgttttacaacgtcgtgactgggaaaaccctggcgttacccaacttaatcgccttgcagcacatccccctttcgccagctggcgtaatagcgaagaggcccgcaccgatcgcccttcccaacagttgcgcagcctgaatggcgaatggaaattgtaagcgttaatattttgttaaaattcgcgttaaatttttgttaaatcagctcattttttaaccaataggccgaaatcggcaaaatcccttataaatcaaaagaatagaccgagatagggttgagtgttgttccagtttggaacaagagtccactattaaagaacgtggactccaacgtcaaagggcgaaaaaccgtctatcagggcgatggcccactacgtgaaccatcaccctaatcaagttttttggggtcgaggtgccgtaaagcactaaatcggaaccctaaagggagcccccgatttagagcttgacggggaaagccggcgaacgtggcgagaaaggaagggaagaaagcgaaaggagcgggcgctagggcgctggcaagtgtagcggtcacgctgcgcgtaaccaccacacccgccgcgcttaatgcgccgctacagggcgcgtcaggtg

SEQ ID NO: 3292 - DNA, 4973 bp, Artificial Sequence
  Synthetic Construct, AT-135 intein modified protein encoding nucleic acids in pBluescript
gcacttttcggggaaatgtgcgcggaacccctatttgtttatttttctaaatacattcaaatatgtatccgctcatgagacaataaccctgataaatgcttcaataatattgaaaaaggaagagtatgagtattcaacatttccgtgtcgcccttattcccttttttgcggcattttgccttcctgtttttgctcacccagaaacgctggtgaaagtaaaagatgctgaagatcagttgggtgcacgagtgggttacatcgaactggatctcaacagcggtaagatccttgagagttttcgccccgaagaacgttttccaatgatgagcacttttaaagttctgctatgtggcgcggtattatcccgtattgacgccgggcaagagcaactcggtcgccgcatacactattctcagaatgacttggttgagtactcaccagtcacagaaaagcatcttacggatggcatgacagtaagagaattatgcagtgctgccataaccatgagtgataacactgcggccaacttacttctgacaacgatcggaggaccgaaggagctaaccgcttttttgcacaacatgggggatcatgtaactcgccttgatcgttgggaaccggagctgaatgaagccataccaaacgacgagcgtgacaccacgatgcctgtagcaatggcaacaacgttgcgcaaactattaactggcgaactacttactctagcttcccggcaacaattaatagactggatggaggcggataaagttgcaggaccacttctgcgctcggcccttccggctggctggtttattgctgataaatctggagccggtgagcgtgggtctcgcggtatcattgcagcactggggccagatggtaagccctcccgtatcgtagttatctacacgacggggagtcaggcaactatggatgaacgaaatagacagatcgctgagataggtgcctcactgattaagcattggtaactgtcagaccaagtttactcatatatactttagattgatttaaaacttcatttttaatttaaaaggatctaggtgaagatcctttttgataatctcatgaccaaaatcccttaacgtgagttttcgttccactgagcgtcagaccccgtagaaaagatcaaaggatcttcttgagatcctttttttctgcgcgtaatctgctgcttgcaaacaaaaaaaccaccgctaccagcggtggtttgtttgccggatcaagagctaccaactctttttccgaaggtaactggcttcagcagagcgcagataccaaatactgtccttctagtgtagccgtagttaggccaccacttcaagaactctgtagcaccgcctacatacctcgctctgctaatcctgttaccagtggctgctgccagtggcgataagtcgtgtcttaccgggttggactcaagacgatagttaccggataaggcgcagcggtcgggctgaacggggggttcgtgcacacagcccagcttggagcgaacgacctacaccgaactgagatacctacagcgtgagctatgagaaagcgccacgcttcccgaagggagaaaggcggacaggtatccggtaagcggcagggtcggaacaggagagcgcacgagggagcttccagggggaaacgcctggtatctttatagtcctgtcgggtttcgccacctctgacttgagcgtcgatttttgtgatgctcgtcaggggggcggagcctatggaaaaacgccagcaacgcggcctttttacggttcctggccttttgctggccttttgctcacatgttctttcctgcgttatcccctgattctgtggataaccgtattaccgcctttgagtgagctgataccgctcgccgcagccgaacgaccgagcgcagcgagtcagtgagcgaggaagcggaagagcgcccaatacgcaaaccgcctctccccgcgcgttggccgattcattaatgcagctggcacgacaggtttcccgactggaaagcgggcagtgagcgcaacgcaattaatgtgagttagctcactcattaggcaccccaggctttacactttatgcttccggctcgtatgttgtgtggaattgtgagcggataacaatttcacacaggaaacagcatatgcaaacaagcattactctgacatccaacgcatccggtacgtttgacggttactattacgaactctggaaggatactggcaatacaacaatgacggtctacactcaaggtcgcttttcctgccagtggtcgaacatcaataacgcgttgtttaggaccgggaagaaatacaaccagaattggcagtctcttggcacaatccggatcacgtactctgcgacttacaacccaaacgggaactcctacttgtgtatctatggctggtctaccaacccattggtcgagttctacatcgttgagtcctgggggaactggagaccgcctggtgcctgcctggacaagacggctctgcggattttcaatcaggggctgctctacgcggatgaggtcgtgacaccgggctcgggggagacagtcggcctcgggctgacggtcaggaacggcatcggggcgtccacagccattgcgaatcagccgatggagctggttgagatcaagctcgctaacggccggaagctgcgcatgacccctaatcaccggatgtccgtgaagggcaagtggattcatgcctgcaacctcaagccggggatgctcctggactacagcatcggcgagtaccagaagcgcgaggacaccctcctgattcctctccagctggaggattacactgaggtgaacaattcgcagaccctgggccacaacggcggggtcctcaccaagaagatcatgacgccggcgtcaatgacatccgacctggcttacttcctcggctgcctgttcggcaacgggtgcatcgtccagaataagtaccaggtttgcttctaccattctcggctcgacgtgctgtacggcctccaggagaaggggaagaagctgttcggcatcaaggggtctctcaacgatttcgccaatggcaggttcgagctgtgcttcgcgtcacggcagctcttctactggctccacctgaaccagctggtcaagacgcagaagtcagaggacctggagcgcatccccctctccctgaggaggtccagcagggttactctcctgtccttcttctgcggcctgattgacaccaacggctacgtgccacaggatggcaagctcagcatcgcttcggcctcgtctgatttcattcataacctgcagcagatcggcgagtccattgggctctgcttcagcatctaccagaatacgaagggggagaacctgcagaatcagcacaacaatacatggggcctctgcctgtctcccatgctctcaaacgtggacgcgctggattacctcaaccataatagcatcaagtgccaggagggcccggtggtcatttcgaagtgcgtcctcaactactcgccctacaagatcgagtctgttaatattggcgctgtgtgcgactacagctacgatttcgccatcgagggcatcaatgataatgactcttggtactggcagggggctctcaagtctcacaacacgtccctgggccaagtgacaatcgatggcgggacctacgacatctataggacgacacgcgtcaaccagccttccattgtggggacagccacgttcgatcagtactggagcgtgcgcacctctaagcggacttcaggaacagtgaccgtgaccgatcacttccgcgcctgggcgaaccggggcctgaacctcggcacaatagaccaaattacattgtgcgtggagggttaccaaagctctggatcagccaacatcacccagaacaccttctctcagggctcttcttccggcagttcgggtggctcatccggctccacaacgactactcgcatcgagtgtgagaacatgtccttgtccggaccctacgttagcaggatcaccaatccctttaatggtattgcgctgtacgccaacggagacacagcccgcgctaccgttaacttccccgcaagtcgcaactacaatttccgcctgcggggttgcggcaacaacaataatcttgcccgtgtggacctgaggatcgacggacggaccgtcgggaccttttattaccagggcacatacccctgggaggccccaattgacaatgtttatgtcagtgcggggagtcatacagtcgaaatcactgttactgcggataacggcacatgggacgtgtatgccgactacctggtgatacagtgactcgagggggggcccggtacccaattcgccctatagtgagtcgtattacaattcactggccgtcgttttacaacgtcgtgactgggaaaaccctggcgttacccaacttaatcgccttgcagcacatccccctttcgccagctggcgtaatagcgaagaggcccgcaccgatcgcccttcccaacagttgcgcagcctgaatggcgaatggaaattgtaagcgttaatattttgttaaaattcgcgttaaatttttgttaaatcagctcattttttaaccaataggccgaaatcggcaaaatcccttataaatcaaaagaatagaccgagatagggttgagtgttgttccagtttggaacaagagtccactattaaagaacgtggactccaacgtcaaagggcgaaaaaccgtctatcagggcgatggcccactacgtgaaccatcaccctaatcaagttttttggggtcgaggtgccgtaaagcactaaatcggaaccctaaagggagcccccgatttagagcttgacggggaaagccggcgaacgtggcgagaaaggaagggaagaaagcgaaaggagcgggcgctagggcgctggcaagtgtagcggtcacgctgcgcgtaaccaccacacccgccgcgcttaatgcgccgctacagggcgcgtcaggtg

SEQ ID NO: 3293 - DNA, 5237 bp, Artificial Sequence
  Synthetic Construct, AT-136 intein modified protein encoding nucleic acids in pBluescript
gcacttttcggggaaatgtgcgcggaacccctatttgtttatttttctaaatacattcaaatatgtatccgctcatgagacaataaccctgataaatgcttcaataatattgaaaaaggaagagtatgagtattcaacatttccgtgtcgcccttattcccttttttgcggcattttgccttcctgtttttgctcacccagaaacgctggtgaaagtaaaagatgctgaagatcagttgggtgcacgagtgggttacatcgaactggatctcaacagcggtaagatccttgagagttttcgccccgaagaacgttttccaatgatgagcacttttaaagttctgctatgtggcgcggtattatcccgtattgacgccgggcaagagcaactcggtcgccgcatacactattctcagaatgacttggttgagtactcaccagtcacagaaaagcatcttacggatggcatgacagtaagagaattatgcagtgctgccataaccatgagtgataacactgcggccaacttacttctgacaacgatcggaggaccgaaggagctaaccgcttttttgcacaacatgggggatcatgtaactcgccttgatcgttgggaaccggagctgaatgaagccataccaaacgacgagcgtgacaccacgatgcctgtagcaatggcaacaacgttgcgcaaactattaactggcgaactacttactctagcttcccggcaacaattaatagactggatggaggcggataaagttgcaggaccacttctgcgctcggcccttccggctggctggtttattgctgataaatctggagccggtgagcgtgggtctcgcggtatcattgcagcactggggccagatggtaagccctcccgtatcgtagttatctacacgacggggagtcaggcaactatggatgaacgaaatagacagatcgctgagataggtgcctcactgattaagcattggtaactgtcagaccaagtttactcatatatactttagattgatttaaaacttcatttttaatttaaaaggatctaggtgaagatcctttttgataatctcatgaccaaaatcccttaacgtgagttttcgttccactgagcgtcagaccccgtagaaaagatcaaaggatcttcttgagatcctttttttctgcgcgtaatctgctgcttgcaaacaaaaaaaccaccgctaccagcggtggtttgtttgccggatcaagagctaccaactctttttccgaaggtaactggcttcagcagagcgcagataccaaatactgtccttctagtgtagccgtagttaggccaccacttcaagaactctgtagcaccgcctacatacctcgctctgctaatcctgttaccagtggctgctgccagtggcgataagtcgtgtcttaccgggttggactcaagacgatagttaccggataaggcgcagcggtcgggctgaacggggggttcgtgcacacagcccagcttggagcgaacgacctacaccgaactgagatacctacagcgtgagctatgagaaagcgccacgcttcccgaagggagaaaggcggacaggtatccggtaagcggcagggtcggaacaggagagcgcacgagggagcttccagggggaaacgcctggtatctttatagtcctgtcgggtttcgccacctctgacttgagcgtcgatttttgtgatgctcgtcaggggggcggagcctatggaaaaacgccagcaacgcggcctttttacggttcctggccttttgctggccttttgctcacatgttctttcctgcgttatcccctgattctgtggataaccgtattaccgcctttgagtgagctgataccgctcgccgcagccgaacgaccgagcgcagcgagtcagtgagcgaggaagcggaagagcgcccaatacgcaaaccgcctctccccgcgcgttggccgattcattaatgcagctggcacgacaggtttcccgactggaaagcgggcagtgagcgcaacgcaattaatgtgagttagctcactcattaggcaccccaggctttacactttatgcttccggctcgtatgttgtgtggaattgtgagcggataacaatttcacacaggaaacagcatatgcaaacaagcattactctgacatccaacgcatccggtacgtttgacggttactattacgaactctggaaggatactggcaatacaacaatgacggtctacactcaaggtcgcttttcctgccagtggtcgaacatcaataacgcgttgtttaggaccgggaagaaatacaaccagaattggcagtctcttggcacaatccggatcacgtactctgcgacttacaacccaaacgggaactcctacttgtgtatctatggctggtctaccaacccattggtcgagttctacatcgttgagtcctgggggaactggagaccgcctggtgcctgcgtgctgcatgacactgagatctacgtgaatggcatggttatggaggcggagcagatttggcaggcttacgcgggggaggcggagttcgacggcgaggggttctggacagagccgaacaaggagctcctggttaatagcctcgatgagaccacgggcaagatcgtgttcgcccggattcgcaggctgtaccgccagtgggttagggagaagctcaggaaggtgcggctgaaggacggctccagcatcacaattacttgcaggcacaagctcttcatccgggactcctggaagaacgatttccaagtgggcgacgatgtctgcgttcccgcgaagctgatgtgggacgggaagccagaggacccagatgtggtcaagttcgtcgcttggcaggttgctgagggctgggagagggtcaattccggcatgttcggggttagccagaagggcaaggacgtgctggaggggctcctggaggtcttctcgcggctgggcaagcgctacgatatcaagattaactgcccaaaggttgtggcgcacgggtctaagaagaattgctacgagttcagcgctcattcgctggagtacaggaagttcctggaggagaagcgctacggctgggggaagaggtcccatgagaagaccatccctctgttcattatgcaggccgacctcgattcggtgcgggtcttcctgtctaactacttcgacgcggagggctgggtgaataagaccgttcgctgcgtggagatctccacggcctcgtctcagctcatccaggagctgagcattctcctgcggcgcttcggcgtctggatgaagatctcaccgcagcagaagtgcgctaccaacggcacgggggttttctgcacatactacatcgggactttcggcgggaatagcgccaggtgcttcctccaggagatcggcttcaacgacagcgggaagcaggagaatctgaagtcgatctgcgagaagattgcggactctaacgtggagggcatcccggcttcagatattgtggccgagctcgtcgagaagacccagctcccagtcggcagcctggggatccaggaccctatctacatggacggctgccaggatttctctcccacgtcactggagaaggtcatcaactcaattgaggatatcatttccggcgctggggaggaggagtacggccagctcaagtcatccaagctgaggaacaagacactggaggcttactcgctcctgaatatcctggagctggagatctacaagactcggctccagaagctcctgaaccaggaggtgtactactgccagatcgagtccattgaggagatggagtacgagggctgggtctacgacttcgaggtttccaagtaccacaatttcgttgctaacaacatcatttgccacaatacgtccctgggccaagtgacaatcgatggcgggacctacgacatctataggacgacacgcgtcaaccagccttccattgtggggacagccacgttcgatcagtactggagcgtgcgcacctctaagcggacttcaggaacagtgaccgtgaccgatcacttccgcgcctgggcgaaccggggcctgaacctcggcacaatagaccaaattacattgtgcgtggagggttaccaaagctctggatcagccaacatcacccagaacaccttctctcagggctcttcttccggcagttcgggtggctcatccggctccacaacgactactcgcatcgagtgtgagaacatgtccttgtccggaccctacgttagcaggatcaccaatccctttaatggtattgcgctgtacgccaacggagacacagcccgcgctaccgttaacttccccgcaagtcgcaactacaatttccgcctgcggggttgcggcaacaacaataatcttgcccgtgtggacctgaggatcgacggacggaccgtcgggaccttttattaccagggcacatacccctgggaggccccaattgacaatgtttatgtcagtgcggggagtcatacagtcgaaatcactgttactgcggataacggcacatgggacgtgtatgccgactacctggtgatacagtgactcgagggggggcccggtacccaattcgccctatagtgagtcgtattacaattcactggccgtcgttttacaacgtcgtgactgggaaaaccctggcgttacccaacttaatcgccttgcagcacatccccctttcgccagctggcgtaatagcgaagaggcccgcaccgatcgcccttcccaacagttgcgcagcctgaatggcgaatggaaattgtaagcgttaatattttgttaaaattcgcgttaaatttttgttaaatcagctcattttttaaccaataggccgaaatcggcaaaatcccttataaatcaaaagaatagaccgagatagggttgagtgttgttccagtttggaacaagagtccactattaaagaacgtggactccaacgtcaaagggcgaaaaaccgtctatcagggcgatggcccactacgtgaaccatcaccctaatcaagttttttggggtcgaggtgccgtaaagcactaaatcggaaccctaaagggagcccccgatttagagcttgacggggaaagccggcgaacgtggcgagaaaggaagggaagaaagcgaaaggagcgggcgctagggcgctggcaagtgtagcggtcacgctgcgcgtaaccaccacacccgccgcgcttaatgcgccgctacagggcgcgtcaggtg

SEQ ID NO: 3294 - DNA, 4997 bp, Artificial Sequence
  Synthetic Construct, AT-137 intein modified protein encoding nucleic acids in pBluescript
gcacttttcggggaaatgtgcgcggaacccctatttgtttatttttctaaatacattcaaatatgtatccgctcatgagacaataaccctgataaatgcttcaataatattgaaaaaggaagagtatgagtattcaacatttccgtgtcgcccttattcccttttttgcggcattttgccttcctgtttttgctcacccagaaacgctggtgaaagtaaaagatgctgaagatcagttgggtgcacgagtgggttacatcgaactggatctcaacagcggtaagatccttgagagttttcgccccgaagaacgttttccaatgatgagcacttttaaagttctgctatgtggcgcggtattatcccgtattgacgccgggcaagagcaactcggtcgccgcatacactattctcagaatgacttggttgagtactcaccagtcacagaaaagcatcttacggatggcatgacagtaagagaattatgcagtgctgccataaccatgagtgataacactgcggccaacttacttctgacaacgatcggaggaccgaaggagctaaccgcttttttgcacaacatgggggatcatgtaactcgccttgatcgttgggaaccggagctgaatgaagccataccaaacgacgagcgtgacaccacgatgcctgtagcaatggcaacaacgttgcgcaaactattaactggcgaactacttactctagcttcccggcaacaattaatagactggatggaggcggataaagttgcaggaccacttctgcgctcggcccttccggctggctggtttattgctgataaatctggagccggtgagcgtgggtctcgcggtatcattgcagcactggggccagatggtaagccctcccgtatcgtagttatctacacgacggggagtcaggcaactatggatgaacgaaatagacagatcgctgagataggtgcctcactgattaagcattggtaactgtcagaccaagtttactcatatatactttagattgatttaaaacttcatttttaatttaaaaggatctaggtgaagatcctttttgataatctcatgaccaaaatcccttaacgtgagttttcgttccactgagcgtcagaccccgtagaaaagatcaaaggatcttcttgagatcctttttttctgcgcgtaatctgctgcttgcaaacaaaaaaaccaccgctaccagcggtggtttgtttgccggatcaagagctaccaactctttttccgaaggtaactggcttcagcagagcgcagataccaaatactgtccttctagtgtagccgtagttaggccaccacttcaagaactctgtagcaccgcctacatacctcgctctgctaatcctgttaccagtggctgctgccagtggcgataagtcgtgtcttaccgggttggactcaagacgatagttaccggataaggcgcagcggtcgggctgaacggggggttcgtgcacacagcccagcttggagcgaacgacctacaccgaactgagatacctacagcgtgagctatgagaaagcgccacgcttcccgaagggagaaaggcggacaggtatccggtaagcggcagggtcggaacaggagagcgcacgagggagcttccagggggaaacgcctggtatctttatagtcctgtcgggtttcgccacctctgacttgagcgtcgatttttgtgatgctcgtcaggggggcggagcctatggaaaaacgccagcaacgcggcctttttacggttcctggccttttgctggccttttgctcacatgttctttcctgcgttatcccctgattctgtggataaccgtattaccgcctttgagtgagctgataccgctcgccgcagccgaacgaccgagcgcagcgagtcagtgagcgaggaagcggaagagcgcccaatacgcaaaccgcctctccccgcgcgttggccgattcattaatgcagctggcacgacaggtttcccgactggaaagcgggcagtgagcgcaacgcaattaatgtgagttagctcactcattaggcaccccaggctttacactttatgcttccggctcgtatgttgtgtggaattgtgagcggataacaatttcacacaggaaacagcatatgcaaacaagcattactctgacatccaacgcatccggtacgtttgacggttactattacgaactctggaaggatactggcaatacaacaatgacggtctacactcaaggtcgcttttcctgccagtggtcgaacatcaataacgcgttgtttaggaccgggaagaaatacaaccagaattggcagtctcttggcacaatccggatcacgtactctgcgacttacaacccaaacgggaactcctacttgtgtatctatggctggtctaccaacccattggtcgagttctacatcgttgagtcctgggggaactggagaccgcctggtgcctcggttacgggggatactgaggttactattaggcggaatgggcggattgagttcgtccctattgagaagctgttcgagcgggtggatcaccgggtgggggagaaggagtactgcgtgctcggcggggtcgaggctctcacactggacaacaggggcaggctggtctggaagaaggtcccatacgttatgaggcacaagactgataagaggatctaccgggtgtggttcacaaactcctggtacctcgacgtcactgaggatcattcactcatcggctacctgaatacctccaaggttaagccagggaagccactcaaggagaggctggtggaggtcaagccagaggagctcggcgggaaggtcaagtccctgatcaccccaaaccgccctatcgccaggacgattaaggccaatcctatcgcggttaagctctgggagctgattggcctcctggtgggcgacgggaactggggcgggcagagcaattgggcgaagtactacgtgggcctctcgtgcgggctggataaggctgagatcgagcgcaaggtcctcaacccgctgagggaggcctcggttatttctaattactacgacaagtccaagaagggcgatgtctcaatcctctccaagtggctggcggggttcatggttaagtacttcaaggacgagaacggcaataaggctatcccgtctttcatgttcaacctcccccgggagtacattgaggctttcctcaggggcctgttctccgctgacgggaccgtgagcctgaggaggggcatcccggagattaggctcacgtcggttaaccgggagctgtctgatgcggtgcgcaagctcctgtggctcgttggcgtgtccaacagcctgttcaccgagacgaagcccaatcgctacctggagaaggagagcggcacccactcgatccatgtcaggattaagaacaagcaccggttcgccgaccgcatcggcttcctgattgataggaagtctacaaagctctcagagaacctgggcgggcatactaataagaagagggcgtacaagtacgacttcgatctggtgtacccgcggaagatcgaggagattacgtacgacggctacgtctacgatattgaggttgagggcacacataggttcttcgctaatggcattctcgttcataatacgtccctgggccaagtgacaatcgatggcgggacctacgacatctataggacgacacgcgtcaaccagccttccattgtggggacagccacgttcgatcagtactggagcgtgcgcacctctaagcggacttcaggaacagtgaccgtgaccgatcacttccgcgcctgggcgaaccggggcctgaacctcggcacaatagaccaaattacattgtgcgtggagggttaccaaagctctggatcagccaacatcacccagaacaccttctctcagggctcttcttccggcagttcgggtggctcatccggctccacaacgactactcgcatcgagtgtgagaacatgtccttgtccggaccctacgttagcaggatcaccaatccctttaatggtattgcgctgtacgccaacggagacacagcccgcgctaccgttaacttccccgcaagtcgcaactacaatttccgcctgcggggttgcggcaacaacaataatcttgcccgtgtggacctgaggatcgacggacggaccgtcgggaccttttattaccagggcacatacccctgggaggccccaattgacaatgtttatgtcagtgcggggagtcatacagtcgaaatcactgttactgcggataacggcacatgggacgtgtatgccgactacctggtgatacagtgactcgagggggggcccggtacccaattcgccctatagtgagtcgtattacaattcactggccgtcgttttacaacgtcgtgactgggaaaaccctggcgttacccaacttaatcgccttgcagcacatccccctttcgccagctggcgtaatagcgaagaggcccgcaccgatcgcccttcccaacagttgcgcagcctgaatggcgaatggaaattgtaagcgttaatattttgttaaaattcgcgttaaatttttgttaaatcagctcattttttaaccaataggccgaaatcggcaaaatcccttataaatcaaaagaatagaccgagatagggttgagtgttgttccagtttggaacaagagtccactattaaagaacgtggactccaacgtcaaagggcgaaaaaccgtctatcagggcgatggcccactacgtgaaccatcaccctaatcaagttttttggggtcgaggtgccgtaaagcactaaatcggaaccctaaagggagcccccgatttagagcttgacggggaaagccggcgaacgtggcgagaaaggaagggaagaaagcgaaaggagcgggcgctagggcgctggcaagtgtagcggtcacgctgcgcgtaaccaccacacccgccgcgcttaatgcgccgctacagggcgcgtcaggtg

SEQ ID NO: 3295 - DNA, 5096 bp, Artificial Sequence
  Synthetic Construct, AT-138 intein modified protein encoding nucleic acids in pBluescript
gcacttttcggggaaatgtgcgcggaacccctatttgtttatttttctaaatacattcaaatatgtatccgctcatgagacaataaccctgataaatgcttcaataatattgaaaaaggaagagtatgagtattcaacatttccgtgtcgcccttattcccttttttgcggcattttgccttcctgtttttgctcacccagaaacgctggtgaaagtaaaagatgctgaagatcagttgggtgcacgagtgggttacatcgaactggatctcaacagcggtaagatccttgagagttttcgccccgaagaacgttttccaatgatgagcacttttaaagttctgctatgtggcgcggtattatcccgtattgacgccgggcaagagcaactcggtcgccgcatacactattctcagaatgacttggttgagtactcaccagtcacagaaaagcatcttacggatggcatgacagtaagagaattatgcagtgctgccataaccatgagtgataacactgcggccaacttacttctgacaacgatcggaggaccgaaggagctaaccgcttttttgcacaacatgggggatcatgtaactcgccttgatcgttgggaaccggagctgaatgaagccataccaaacgacgagcgtgacaccacgatgcctgtagcaatggcaacaacgttgcgcaaactattaactggcgaactacttactctagcttcccggcaacaattaatagactggatggaggcggataaagttgcaggaccacttctgcgctcggcccttccggctggctggtttattgctgataaatctggagccggtgagcgtgggtctcgcggtatcattgcagcactggggccagatggtaagccctcccgtatcgtagttatctacacgacggggagtcaggcaactatggatgaacgaaatagacagatcgctgagataggtgcctcactgattaagcattggtaactgtcagaccaagtttactcatatatactttagattgatttaaaacttcatttttaatttaaaaggatctaggtgaagatcctttttgataatctcatgaccaaaatcccttaacgtgagttttcgttccactgagcgtcagaccccgtagaaaagatcaaaggatcttcttgagatcctttttttctgcgcgtaatctgctgcttgcaaacaaaaaaaccaccgctaccagcggtggtttgtttgccggatcaagagctaccaactctttttccgaaggtaactggcttcagcagagcgcagataccaaatactgtccttctagtgtagccgtagttaggccaccacttcaagaactctgtagcaccgcctacatacctcgctctgctaatcctgttaccagtggctgctgccagtggcgataagtcgtgtcttaccgggttggactcaagacgatagttaccggataaggcgcagcggtcgggctgaacggggggttcgtgcacacagcccagcttggagcgaacgacctacaccgaactgagatacctacagcgtgagctatgagaaagcgccacgcttcccgaagggagaaaggcggacaggtatccggtaagcggcagggtcggaacaggagagcgcacgagggagcttccagggggaaacgcctggtatctttatagtcctgtcgggtttcgccacctctgacttgagcgtcgatttttgtgatgctcgtcaggggggcggagcctatggaaaaacgccagcaacgcggcctttttacggttcctggccttttgctggccttttgctcacatgttctttcctgcgttatcccctgattctgtggataaccgtattaccgcctttgagtgagctgataccgctcgccgcagccgaacgaccgagcgcagcgagtcagtgagcgaggaagcggaagagcgcccaatacgcaaaccgcctctccccgcgcgttggccgattcattaatgcagctggcacgacaggtttcccgactggaaagcgggcagtgagcgcaacgcaattaatgtgagttagctcactcattaggcaccccaggctttacactttatgcttccggctcgtatgttgtgtggaattgtgagcggataacaatttcacacaggaaacagcatatgcaaacaagcattactctgacatccaacgcatccggtacgtttgacggttactattacgaactctggaaggatactggcaatacaacaatgacggtctacactcaaggtcgcttttcctgccagtggtcgaacatcaataacgcgttgtttaggaccgggaagaaatacaaccagaattggcagtctcttggcacaatccggatcacgtactctgcgacttacaacccaaacgggaactcctacttgtgtatctatggctggtctaccaacccattggtcgagttctacatcgttgagtcctgggggaactggagaccgcctggtgcctgcctgaccgctgatacttacgtttggacagatcgggggctggagacagtcgctgaggttttcgggcgggcggggctccctctctcatccactagcagggttaccgacgtgagggaccgggatatccgggtggtcaacgagaagggcgagctggagcaggtggctgctctcacgcataatgggaggcagccagttgtgaggatcacagtcgcttccggcaggcaggtcacggttacacggaaccaccctctgcgcgtcatgaatgacgatggcttcattgtttggagggaggctgggcagctgagggagggcgacgtgctcgtctccgctgccttcggcgctgtccaggctgcttcgggcgggggcctctctgaggacgaggctgttctcctggggtacctgaccgctgctggcagcctcgatccagctgggcatgtgtgcttcaccacgacagacatcgagacaggcgctgagttcgctgctctggctgagtggctcctggacactaccgtcactgctgttccaggggatggccaggtggcctacgtgctgtccgacccagctgctaggcacacgctcgctgagcgctacggcgtggattacgctgctgctgctcggatcccgcagtgcgtccgcactgctggcgacaagatgcagagggctttcctcgctgctctgtacaccgctgctggctggactgacaccagcgctgccgttgggctgaggacggcttcggctccactcgcgagggaggtgcagtacctcctgtacgggctgggcatcccagccgacctcgataggtctcacgggaacggccagcatccttgggctgtgaccatttcaccagctgctgctccaaggttccacactgaggtcggcttccgcaccgctcagcagtcgccacagacggggctgcatgagccaacaccacaggtggaggctatcccaaatctcacgggcctgattcacgctctcagggactcaatcggggatcgggccgagtccacagacgatccattccctgctgctagcgggggcgcttacgacagggatcaggttcgccgcgtgatcgactgggctaagaggaggactgatgaggctccagctaccgctaacgctatcctcggctacctgacgcagctcacagatgccaggtacacgtacgagccaattacagccgtcgaggacgcgggccagcagcctaccttcgacctcatggttccaaggactcatagcttcctcgccaatggcattctctcacacaacacgtccctgggccaagtgacaatcgatggcgggacctacgacatctataggacgacacgcgtcaaccagccttccattgtggggacagccacgttcgatcagtactggagcgtgcgcacctctaagcggacttcaggaacagtgaccgtgaccgatcacttccgcgcctgggcgaaccggggcctgaacctcggcacaatagaccaaattacattgtgcgtggagggttaccaaagctctggatcagccaacatcacccagaacaccttctctcagggctcttcttccggcagttcgggtggctcatccggctccacaacgactactcgcatcgagtgtgagaacatgtccttgtccggaccctacgttagcaggatcaccaatccctttaatggtattgcgctgtacgccaacggagacacagcccgcgctaccgttaacttccccgcaagtcgcaactacaatttccgcctgcggggttgcggcaacaacaataatcttgcccgtgtggacctgaggatcgacggacggaccgtcgggaccttttattaccagggcacatacccctgggaggccccaattgacaatgtttatgtcagtgcggggagtcatacagtcgaaatcactgttactgcggataacggcacatgggacgtgtatgccgactacctggtgatacagtgactcgagggggggcccggtacccaattcgccctatagtgagtcgtattacaattcactggccgtcgttttacaacgtcgtgactgggaaaaccctggcgttacccaacttaatcgccttgcagcacatccccctttcgccagctggcgtaatagcgaagaggcccgcaccgatcgcccttcccaacagttgcgcagcctgaatggcgaatggaaattgtaagcgttaatattttgttaaaattcgcgttaaatttttgttaaatcagctcattttttaaccaataggccgaaatcggcaaaatcccttataaatcaaaagaatagaccgagatagggttgagtgttgttccagtttggaacaagagtccactattaaagaacgtggactccaacgtcaaagggcgaaaaaccgtctatcagggcgatggcccactacgtgaaccatcaccctaatcaagttttttggggtcgaggtgccgtaaagcactaaatcggaaccctaaagggagcccccgatttagagcttgacggggaaagccggcgaacgtggcgagaaaggaagggaagaaagcgaaaggagcgggcgctagggcgctggcaagtgtagcggtcacgctgcgcgtaaccaccacacccgccgcgcttaatgcgccgctacagggcgcgtcaggtg

SEQ ID NO: 3296 - DNA, 4901 bp, Artificial Sequence
  Synthetic Construct, AT-139 intein modified protein encoding nucleic acids in pBluescript
gcacttttcggggaaatgtgcgcggaacccctatttgtttatttttctaaatacattcaaatatgtatccgctcatgagacaataaccctgataaatgcttcaataatattgaaaaaggaagagtatgagtattcaacatttccgtgtcgcccttattcccttttttgcggcattttgccttcctgtttttgctcacccagaaacgctggtgaaagtaaaagatgctgaagatcagttgggtgcacgagtgggttacatcgaactggatctcaacagcggtaagatccttgagagttttcgccccgaagaacgttttccaatgatgagcacttttaaagttctgctatgtggcgcggtattatcccgtattgacgccgggcaagagcaactcggtcgccgcatacactattctcagaatgacttggttgagtactcaccagtcacagaaaagcatcttacggatggcatgacagtaagagaattatgcagtgctgccataaccatgagtgataacactgcggccaacttacttctgacaacgatcggaggaccgaaggagctaaccgcttttttgcacaacatgggggatcatgtaactcgccttgatcgttgggaaccggagctgaatgaagccataccaaacgacgagcgtgacaccacgatgcctgtagcaatggcaacaacgttgcgcaaactattaactggcgaactacttactctagcttcccggcaacaattaatagactggatggaggcggataaagttgcaggaccacttctgcgctcggcccttccggctggctggtttattgctgataaatctggagccggtgagcgtgggtctcgcggtatcattgcagcactggggccagatggtaagccctcccgtatcgtagttatctacacgacggggagtcaggcaactatggatgaacgaaatagacagatcgctgagataggtgcctcactgattaagcattggtaactgtcagaccaagtttactcatatatactttagattgatttaaaacttcatttttaatttaaaaggatctaggtgaagatcctttttgataatctcatgaccaaaatcccttaacgtgagttttcgttccactgagcgtcagaccccgtagaaaagatcaaaggatcttcttgagatcctttttttctgcgcgtaatctgctgcttgcaaacaaaaaaaccaccgctaccagcggtggtttgtttgccggatcaagagctaccaactctttttccgaaggtaactggcttcagcagagcgcagataccaaatactgtccttctagtgtagccgtagttaggccaccacttcaagaactctgtagcaccgcctacatacctcgctctgctaatcctgttaccagtggctgctgccagtggcgataagtcgtgtcttaccgggttggactcaagacgatagttaccggataaggcgcagcggtcgggctgaacggggggttcgtgcacacagcccagcttggagcgaacgacctacaccgaactgagatacctacagcgtgagctatgagaaagcgccacgcttcccgaagggagaaaggcggacaggtatccggtaagcggcagggtcggaacaggagagcgcacgagggagcttccagggggaaacgcctggtatctttatagtcctgtcgggtttcgccacctctgacttgagcgtcgatttttgtgatgctcgtcaggggggcggagcctatggaaaaacgccagcaacgcggcctttttacggttcctggccttttgctggccttttgctcacatgttctttcctgcgttatcccctgattctgtggataaccgtattaccgcctttgagtgagctgataccgctcgccgcagccgaacgaccgagcgcagcgagtcagtgagcgaggaagcggaagagcgcccaatacgcaaaccgcctctccccgcgcgttggccgattcattaatgcagctggcacgacaggtttcccgactggaaagcgggcagtgagcgcaacgcaattaatgtgagttagctcactcattaggcaccccaggctttacactttatgcttccggctcgtatgttgtgtggaattgtgagcggataacaatttcacacaggaaacagcatatgcaaacaagcattactctgacatccaacgcatccggtacgtttgacggttactattacgaactctggaaggatactggcaatacaacaatgacggtctacactcaaggtcgcttttcctgccagtggtcgaacatcaataacgcgttgtttaggaccgggaagaaatacaaccagaattggcagtctcttggcacaatccggatcacgtactctgcgacttacaacccaaacgggaactcctacttgtgtatctatggctggtctaccaacccattggtcgagttctacatcgttgagtcctgggggaactggagaccgcctggtgcctgcatgcactacgacacactcgtgacactcgctgacggcacacaggagaagatcgggacaatcgtggaccgcaagctggacgtggaggtcctgtcgtacgatccagagaccgacaggatcgtgccaaggagggtggtcaactggttcgataatggcgccgcggaccacttcctgcagttcactgtgggcaggtctgggaagccaggcggggctcagttcaccgctacgccaaaccatctcatcaggacccctggcgggtggagggaggctggcgagctcattgctggggacagggttctggtgcacgagccacattacctcaatgagcagcagaggcaggttgtgtacggctcgctcatgggcagggggacgctggtcccagataggcacggcgggcctggcgttcacttctgcatggctcatacagccgagcaggctgcctacctggactggaaggtctccctcctgggcaacattgcccactcacgcaccgctgaggcttccgctacggtcggggttgagttcacaccgatgcccgagctcagcgagctgcatagggtcgttgatttcggcgacgggcacacccatctcacgtgggagttcctcaagcagctgacgccactcgcgctggctgtgtggtacctcgatgcgggcacactgactatccctcagtccgggactgacgatgacgccagggtgcagattgacgtcgagaccctgtcgccaggctctcggcagaggctcgtcgagtacctgagggatacccacgagctcgacgctgctgtggtccagcagggcgctgacgcgaggtctctcctggagttcacaccagctgctaccgtgcgcttcctggagctggttgcgccatacgtgcctgagtcaatgtccagcatgctcctggctcagttcaggggcaggtgcagcgtcacgccagagtactcggatccagtccagaggctcgttgctgctccagtgctggacatccaggtgaagcccggcagcacacgcaagttcgacattgaggttgagggcaatcataactacttcgtggatggggtcatggttcataatacgtccctgggccaagtgacaatcgatggcgggacctacgacatctataggacgacacgcgtcaaccagccttccattgtggggacagccacgttcgatcagtactggagcgtgcgcacctctaagcggacttcaggaacagtgaccgtgaccgatcacttccgcgcctgggcgaaccggggcctgaacctcggcacaatagaccaaattacattgtgcgtggagggttaccaaagctctggatcagccaacatcacccagaacaccttctctcagggctcttcttccggcagttcgggtggctcatccggctccacaacgactactcgcatcgagtgtgagaacatgtccttgtccggaccctacgttagcaggatcaccaatccctttaatggtattgcgctgtacgccaacggagacacagcccgcgctaccgttaacttccccgcaagtcgcaactacaatttccgcctgcggggttgcggcaacaacaataatcttgcccgtgtggacctgaggatcgacggacggaccgtcgggaccttttattaccagggcacatacccctgggaggccccaattgacaatgtttatgtcagtgcggggagtcatacagtcgaaatcactgttactgcggataacggcacatgggacgtgtatgccgactacctggtgatacagtgactcgagggggggcccggtacccaattcgccctatagtgagtcgtattacaattcactggccgtcgttttacaacgtcgtgactgggaaaaccctggcgttacccaacttaatcgccttgcagcacatccccctttcgccagctggcgtaatagcgaagaggcccgcaccgatcgcccttcccaacagttgcgcagcctgaatggcgaatggaaattgtaagcgttaatattttgttaaaattcgcgttaaatttttgttaaatcagctcattttttaaccaataggccgaaatcggcaaaatcccttataaatcaaaagaatagaccgagatagggttgagtgttgttccagtttggaacaagagtccactattaaagaacgtggactccaacgtcaaagggcgaaaaaccgtctatcagggcgatggcccactacgtgaaccatcaccctaatcaagttttttggggtcgaggtgccgtaaagcactaaatcggaaccctaaagggagcccccgatttagagcttgacggggaaagccggcgaacgtggcgagaaaggaagggaagaaagcgaaaggagcgggcgctagggcgctggcaagtgtagcggtcacgctgcgcgtaaccaccacacccgccgcgcttaatgcgccgctacagggcgcgtcaggtg

SEQ ID NO: 3297 - DNA, 5441 bp, Artificial Sequence
  Synthetic Construct, AT-140 intein modified protein encoding nucleic acids in pBluescript
gcacttttcggggaaatgtgcgcggaacccctatttgtttatttttctaaatacattcaaatatgtatccgctcatgagacaataaccctgataaatgcttcaataatattgaaaaaggaagagtatgagtattcaacatttccgtgtcgcccttattcccttttttgcggcattttgccttcctgtttttgctcacccagaaacgctggtgaaagtaaaagatgctgaagatcagttgggtgcacgagtgggttacatcgaactggatctcaacagcggtaagatccttgagagttttcgccccgaagaacgttttccaatgatgagcacttttaaagttctgctatgtggcgcggtattatcccgtattgacgccgggcaagagcaactcggtcgccgcatacactattctcagaatgacttggttgagtactcaccagtcacagaaaagcatcttacggatggcatgacagtaagagaattatgcagtgctgccataaccatgagtgataacactgcggccaacttacttctgacaacgatcggaggaccgaaggagctaaccgcttttttgcacaacatgggggatcatgtaactcgccttgatcgttgggaaccggagctgaatgaagccataccaaacgacgagcgtgacaccacgatgcctgtagcaatggcaacaacgttgcgcaaactattaactggcgaactacttactctagcttcccggcaacaattaatagactggatggaggcggataaagttgcaggaccacttctgcgctcggcccttccggctggctggtttattgctgataaatctggagccggtgagcgtgggtctcgcggtatcattgcagcactggggccagatggtaagccctcccgtatcgtagttatctacacgacggggagtcaggcaactatggatgaacgaaatagacagatcgctgagataggtgcctcactgattaagcattggtaactgtcagaccaagtttactcatatatactttagattgatttaaaacttcatttttaatttaaaaggatctaggtgaagatcctttttgataatctcatgaccaaaatcccttaacgtgagttttcgttccactgagcgtcagaccccgtagaaaagatcaaaggatcttcttgagatcctttttttctgcgcgtaatctgctgcttgcaaacaaaaaaaccaccgctaccagcggtggtttgtttgccggatcaagagctaccaactctttttccgaaggtaactggcttcagcagagcgcagataccaaatactgtccttctagtgtagccgtagttaggccaccacttcaagaactctgtagcaccgcctacatacctcgctctgctaatcctgttaccagtggctgctgccagtggcgataagtcgtgtcttaccgggttggactcaagacgatagttaccggataaggcgcagcggtcgggctgaacggggggttcgtgcacacagcccagcttggagcgaacgacctacaccgaactgagatacctacagcgtgagctatgagaaagcgccacgcttcccgaagggagaaaggcggacaggtatccggtaagcggcagggtcggaacaggagagcgcacgagggagcttccagggggaaacgcctggtatctttatagtcctgtcgggtttcgccacctctgacttgagcgtcgatttttgtgatgctcgtcaggggggcggagcctatggaaaaacgccagcaacgcggcctttttacggttcctggccttttgctggccttttgctcacatgttctttcctgcgttatcccctgattctgtggataaccgtattaccgcctttgagtgagctgataccgctcgccgcagccgaacgaccgagcgcagcgagtcagtgagcgaggaagcggaagagcgcccaatacgcaaaccgcctctccccgcgcgttggccgattcattaatgcagctggcacgacaggtttcccgactggaaagcgggcagtgagcgcaacgcaattaatgtgagttagctcactcattaggcaccccaggctttacactttatgcttccggctcgtatgttgtgtggaattgtgagcggataacaatttcacacaggaaacagcatatgcaaacaagcattactctgacatccaacgcatccggtacgtttgacggttactattacgaactctggaaggatactggcaatacaacaatgacggtctacactcaaggtcgcttttcctgccagtggtcgaacatcaataacgcgttgtttaggaccgggaagaaatacaaccagaattggcagtctcttggcacaatccggatcacgtactctgcgacttacaacccaaacgggaactcctacttgtgtatctatggctggtctaccaacccattggtcgagttctacatcgttgagtcctgggggaactggagaccgcctggtgcctcgctgctgcctgaggagtggattccgctcgtggagaatggcaaggttcggctgcatcgcatcggggagttcgtggacaagctcatggagaccgacagcgagctcgtcaagcgcaacggcgataccgaggtcctggaggtgcgcgggatcagggctctgtctttcgaccggaagtcaaagaaggcgcgcgtgatgccggtcaaggctgttattcggcaccgctactccggcgatgtgtacgagatcgtcctcggcagcgggaggaggattaccgtcacggaggggcattcgctcttcgcttacggcgacggggagctgagggaggtgacaggcggggagatcaaggctggcgatctcctggctgttccaaggagggtgaacctgcccgagaagaaggagcgcctgaatctcgtcgagctcctgaggaggctcccagaggaggagacaggcgacatcattctgactatccccgtgaagggcaggaagaacttcttcaaggggatgctgcggacactccgctggatttccggcgaggagaagaggccaaggactgctaggaggtacctggagcacctggagggcctgggctacgtgcgcctcaagaagatcggctacgaggttaccgacagggaggggctggagaggtacaggaagctctacgagaggctggtggaggcggtccggtacaacggcaataagcgcgagtacctcgtggagttcaacgctgttcgcgacgtgatcgccctgatgccggaggaggagctcagggattggctggtcggcaccaggaatgggttccggatgaggcccttcgtggagatcgaggaggacttcgctaagctcctgggctactacgtctcggaggggaacgccaggaagtggcggaaccagaagaatggctggtcttacacggtgaagctctacaacgagaatcagcgcgtcctcgacgatatggagtccctggcggagaggttcttcggccgcgtgaagagggggaagaactacatcgagattccaaggaagatggcttacatcattttcgagaacctctgcggcaccctggccgagaataagcgggttccagaggcgatcttcacgtcgcctgagtctgtgcgctgggccttcatcgagggctacttcattggcgacggggatgttcatccttctaagagggtgcggctgtcaacgaagtccgagctcctggtcaacggcctcgttctcctgctcaatagcctgggggtctcggccatcaagattcgccacgactcaggcgtttacagggtttacgtgaacgaggagctcccattcacagattaccgcaagaagaagaacgcgtactactcccatgtcatccctaaggagattctggaggagactttcggcaaggtgttccagcggtccgtcagctacgagaagttccgcgagctcgtgaagtccgagaagctggacggcgagaaggccaagaggatcgagtggctgctcaacggggacgtggtcctcgataaggtcctggaggttaagaagcggccatacgagggctacgtgtacgatctctctgtggaggaggatgagaacttcctcgctggcttcgggctgctctacgctcacaatacgtccctgggccaagtgacaatcgatggcgggacctacgacatctataggacgacacgcgtcaaccagccttccattgtggggacagccacgttcgatcagtactggagcgtgcgcacctctaagcggacttcaggaacagtgaccgtgaccgatcacttccgcgcctgggcgaaccggggcctgaacctcggcacaatagaccaaattacattgtgcgtggagggttaccaaagctctggatcagccaacatcacccagaacaccttctctcagggctcttcttccggcagttcgggtggctcatccggctccacaacgactactcgcatcgagtgtgagaacatgtccttgtccggaccctacgttagcaggatcaccaatccctttaatggtattgcgctgtacgccaacggagacacagcccgcgctaccgttaacttccccgcaagtcgcaactacaatttccgcctgcggggttgcggcaacaacaataatcttgcccgtgtggacctgaggatcgacggacggaccgtcgggaccttttattaccagggcacatacccctgggaggccccaattgacaatgtttatgtcagtgcggggagtcatacagtcgaaatcactgttactgcggataacggcacatgggacgtgtatgccgactacctggtgatacagtgactcgagggggggcccggtacccaattcgccctatagtgagtcgtattacaattcactggccgtcgttttacaacgtcgtgactgggaaaaccctggcgttacccaacttaatcgccttgcagcacatccccctttcgccagctggcgtaatagcgaagaggcccgcaccgatcgcccttcccaacagttgcgcagcctgaatggcgaatggaaattgtaagcgttaatattttgttaaaattcgcgttaaatttttgttaaatcagctcattttttaaccaataggccgaaatcggcaaaatcccttataaatcaaaagaatagaccgagatagggttgagtgttgttccagtttggaacaagagtccactattaaagaacgtggactccaacgtcaaagggcgaaaaaccgtctatcagggcgatggcccactacgtgaaccatcaccctaatcaagttttttggggtcgaggtgccgtaaagcactaaatcggaaccctaaagggagcccccgatttagagcttgacggggaaagccggcgaacgtggcgagaaaggaagggaagaaagcgaaaggagcgggcgctagggcgctggcaagtgtagcggtcacgctgcgcgtaaccaccacacccgccgcgcttaatgcgccgctacagggcgcgtcaggtg

SEQ ID NO: 3298 - DNA, 4835 bp, Artificial Sequence
  Synthetic Construct, AT-141 intein modified protein encoding nucleic acids in pBluescript
gcacttttcggggaaatgtgcgcggaacccctatttgtttatttttctaaatacattcaaatatgtatccgctcatgagacaataaccctgataaatgcttcaataatattgaaaaaggaagagtatgagtattcaacatttccgtgtcgcccttattcccttttttgcggcattttgccttcctgtttttgctcacccagaaacgctggtgaaagtaaaagatgctgaagatcagttgggtgcacgagtgggttacatcgaactggatctcaacagcggtaagatccttgagagttttcgccccgaagaacgttttccaatgatgagcacttttaaagttctgctatgtggcgcggtattatcccgtattgacgccgggcaagagcaactcggtcgccgcatacactattctcagaatgacttggttgagtactcaccagtcacagaaaagcatcttacggatggcatgacagtaagagaattatgcagtgctgccataaccatgagtgataacactgcggccaacttacttctgacaacgatcggaggaccgaaggagctaaccgcttttttgcacaacatgggggatcatgtaactcgccttgatcgttgggaaccggagctgaatgaagccataccaaacgacgagcgtgacaccacgatgcctgtagcaatggcaacaacgttgcgcaaactattaactggcgaactacttactctagcttcccggcaacaattaatagactggatggaggcggataaagttgcaggaccacttctgcgctcggcccttccggctggctggtttattgctgataaatctggagccggtgagcgtgggtctcgcggtatcattgcagcactggggccagatggtaagccctcccgtatcgtagttatctacacgacggggagtcaggcaactatggatgaacgaaatagacagatcgctgagataggtgcctcactgattaagcattggtaactgtcagaccaagtttactcatatatactttagattgatttaaaacttcatttttaatttaaaaggatctaggtgaagatcctttttgataatctcatgaccaaaatcccttaacgtgagttttcgttccactgagcgtcagaccccgtagaaaagatcaaaggatcttcttgagatcctttttttctgcgcgtaatctgctgcttgcaaacaaaaaaaccaccgctaccagcggtggtttgtttgccggatcaagagctaccaactctttttccgaaggtaactggcttcagcagagcgcagataccaaatactgtccttctagtgtagccgtagttaggccaccacttcaagaactctgtagcaccgcctacatacctcgctctgctaatcctgttaccagtggctgctgccagtggcgataagtcgtgtcttaccgggttggactcaagacgatagttaccggataaggcgcagcggtcgggctgaacggggggttcgtgcacacagcccagcttggagcgaacgacctacaccgaactgagatacctacagcgtgagctatgagaaagcgccacgcttcccgaagggagaaaggcggacaggtatccggtaagcggcagggtcggaacaggagagcgcacgagggagcttccagggggaaacgcctggtatctttatagtcctgtcgggtttcgccacctctgacttgagcgtcgatttttgtgatgctcgtcaggggggcggagcctatggaaaaacgccagcaacgcggcctttttacggttcctggccttttgctggccttttgctcacatgttctttcctgcgttatcccctgattctgtggataaccgtattaccgcctttgagtgagctgataccgctcgccgcagccgaacgaccgagcgcagcgagtcagtgagcgaggaagcggaagagcgcccaatacgcaaaccgcctctccccgcgcgttggccgattcattaatgcagctggcacgacaggtttcccgactggaaagcgggcagtgagcgcaacgcaattaatgtgagttagctcactcattaggcaccccaggctttacactttatgcttccggctcgtatgttgtgtggaattgtgagcggataacaatttcacacaggaaacagcatatgcaaacaagcattactctgacatccaacgcatccggtacgtttgacggttactattacgaactctggaaggatactggcaatacaacaatgacggtctacactcaaggtcgcttttcctgccagtggtcgaacatcaataacgcgttgtttaggaccgggaagaaatacaaccagaattggcagtctcttggcacaatccggatcacgtactctgcgacttacaacccaaacgggaactcctacttgtgtatctatggctggtctaccaacccattggtcgagttctacatcgttgagtcctgggggaactggagaccgcctggtgcctcctaccatcatgatttcgagctgctgctggctgacgggcgcaaggttaagatcggggagctggtggacaagctgattgagaagaatcgggaccgcgtcatcctgggcaaggataccgagatcctcccggttgaggacattgagctcctggcctacgatctggagaagagggagatcgttaaggtgaaggctgaccgcgtctcaaggcacaaggctccagagcgcttcatcaagctcaggttctccaatggccgggagattaccgtgacgccggagcatcccgtcatggtttgggagaacggggagatcacagagaagccagcggagaagatcactcctggcgatattgctctcggggttctgcgctacccgattcaggtggacggcaagttcaaggagaggtaccgggatatgagggaggcggaggactaccaggattacctgtactcccggggcgtggtcagcaagatcaagcgcaccgggatctacttcacggtggagaaggctaggagggctctcccgcgggagctggtcaagcccctcatcaacgctggcaagattctcagggttacacagactccaaaggagcgggcgagcttcaatcagaagctggtccgcgagaacatcattgaggggtacctccagaggatcattgagcggatggacgagctggagaggctgtcgcgcgaggatccagctaaggctctggagctcctgcctaagacccagctctactacaagtacggcatcacgtacgggaagctcaagaagctggctgaggctcgcaactcctgggctgagggcatcattcagtcggcggtggctgagcgcatctctctggccaagagggagctggaggagttcttcaagtggtggaacgcgaatgtcaacttcctgaaggtgaagtgcgtcgaggagatcaagaacgaccgctgggagtgggtgtacgacgttactgtggagcctcatcatctcttcgtttcgcatgggctcgttctgcataatacgtccctgggccaagtgacaatcgatggcgggacctacgacatctataggacgacacgcgtcaaccagccttccattgtggggacagccacgttcgatcagtactggagcgtgcgcacctctaagcggacttcaggaacagtgaccgtgaccgatcacttccgcgcctgggcgaaccggggcctgaacctcggcacaatagaccaaattacattgtgcgtggagggttaccaaagctctggatcagccaacatcacccagaacaccttctctcagggctcttcttccggcagttcgggtggctcatccggctccacaacgactactcgcatcgagtgtgagaacatgtccttgtccggaccctacgttagcaggatcaccaatccctttaatggtattgcgctgtacgccaacggagacacagcccgcgctaccgttaacttccccgcaagtcgcaactacaatttccgcctgcggggttgcggcaacaacaataatcttgcccgtgtggacctgaggatcgacggacggaccgtcgggaccttttattaccagggcacatacccctgggaggccccaattgacaatgtttatgtcagtgcggggagtcatacagtcgaaatcactgttactgcggataacggcacatgggacgtgtatgccgactacctggtgatacagtgactcgagggggggcccggtacccaattcgccctatagtgagtcgtattacaattcactggccgtcgttttacaacgtcgtgactgggaaaaccctggcgttacccaacttaatcgccttgcagcacatccccctttcgccagctggcgtaatagcgaagaggcccgcaccgatcgcccttcccaacagttgcgcagcctgaatggcgaatggaaattgtaagcgttaatattttgttaaaattcgcgttaaatttttgttaaatcagctcattttttaaccaataggccgaaatcggcaaaatcccttataaatcaaaagaatagaccgagatagggttgagtgttgttccagtttggaacaagagtccactattaaagaacgtggactccaacgtcaaagggcgaaaaaccgtctatcagggcgatggcccactacgtgaaccatcaccctaatcaagttttttggggtcgaggtgccgtaaagcactaaatcggaaccctaaagggagcccccgatttagagcttgacggggaaagccggcgaacgtggcgagaaaggaagggaagaaagcgaaaggagcgggcgctagggcgctggcaagtgtagcggtcacgctgcgcgtaaccaccacacccgccgcgcttaatgcgccgctacagggcgcgtcaggtg

SEQ ID NO: 3299 - DNA, 5039 bp, Artificial Sequence
  Synthetic Construct, AT-142 intein modified protein encoding nucleic acids in pBluescript
gcacttttcggggaaatgtgcgcggaacccctatttgtttatttttctaaatacattcaaatatgtatccgctcatgagacaataaccctgataaatgcttcaataatattgaaaaaggaagagtatgagtattcaacatttccgtgtcgcccttattcccttttttgcggcattttgccttcctgtttttgctcacccagaaacgctggtgaaagtaaaagatgctgaagatcagttgggtgcacgagtgggttacatcgaactggatctcaacagcggtaagatccttgagagttttcgccccgaagaacgttttccaatgatgagcacttttaaagttctgctatgtggcgcggtattatcccgtattgacgccgggcaagagcaactcggtcgccgcatacactattctcagaatgacttggttgagtactcaccagtcacagaaaagcatcttacggatggcatgacagtaagagaattatgcagtgctgccataaccatgagtgataacactgcggccaacttacttctgacaacgatcggaggaccgaaggagctaaccgcttttttgcacaacatgggggatcatgtaactcgccttgatcgttgggaaccggagctgaatgaagccataccaaacgacgagcgtgacaccacgatgcctgtagcaatggcaacaacgttgcgcaaactattaactggcgaactacttactctagcttcccggcaacaattaatagactggatggaggcggataaagttgcaggaccacttctgcgctcggcccttccggctggctggtttattgctgataaatctggagccggtgagcgtgggtctcgcggtatcattgcagcactggggccagatggtaagccctcccgtatcgtagttatctacacgacggggagtcaggcaactatggatgaacgaaatagacagatcgctgagataggtgcctcactgattaagcattggtaactgtcagaccaagtttactcatatatactttagattgatttaaaacttcatttttaatttaaaaggatctaggtgaagatcctttttgataatctcatgaccaaaatcccttaacgtgagttttcgttccactgagcgtcagaccccgtagaaaagatcaaaggatcttcttgagatcctttttttctgcgcgtaatctgctgcttgcaaacaaaaaaaccaccgctaccagcggtggtttgtttgccggatcaagagctaccaactctttttccgaaggtaactggcttcagcagagcgcagataccaaatactgtccttctagtgtagccgtagttaggccaccacttcaagaactctgtagcaccgcctacatacctcgctctgctaatcctgttaccagtggctgctgccagtggcgataagtcgtgtcttaccgggttggactcaagacgatagttaccggataaggcgcagcggtcgggctgaacggggggttcgtgcacacagcccagcttggagcgaacgacctacaccgaactgagatacctacagcgtgagctatgagaaagcgccacgcttcccgaagggagaaaggcggacaggtatccggtaagcggcagggtcggaacaggagagcgcacgagggagcttccagggggaaacgcctggtatctttatagtcctgtcgggtttcgccacctctgacttgagcgtcgatttttgtgatgctcgtcaggggggcggagcctatggaaaaacgccagcaacgcggcctttttacggttcctggccttttgctggccttttgctcacatgttctttcctgcgttatcccctgattctgtggataaccgtattaccgcctttgagtgagctgataccgctcgccgcagccgaacgaccgagcgcagcgagtcagtgagcgaggaagcggaagagcgcccaatacgcaaaccgcctctccccgcgcgttggccgattcattaatgcagctggcacgacaggtttcccgactggaaagcgggcagtgagcgcaacgcaattaatgtgagttagctcactcattaggcaccccaggctttacactttatgcttccggctcgtatgttgtgtggaattgtgagcggataacaatttcacacaggaaacagcatatgcaaacaagcattactctgacatccaacgcatccggtacgtttgacggttactattacgaactctggaaggatactggcaatacaacaatgacggtctacactcaaggtcgcttttcctgccagtggtcgaacatcaataacgcgttgtttaggaccgggaagaaatacaaccagaattggcagtctcttggcacaatccggatcacgtactctgcgacttacaacccaaacgggaactcctacttgtgtatctatggctggtctaccaacccattggtcgagttctacatcgttgagtcctgggggaactggagaccgcctggtgcctgcatgcatcctgacacatacgtggttactaagtcgggggctaagaaggtctctgagctgactgagggggatgaggtcctgacacataccggcacgttcaagaaggtcatccagccactgaggagggagcacaaggggcgcctcctggttatcaaggcctacggcaccgtgcctgtcaagattacgccggagcacatggtttgggtggtcaagcagatcaggcacaagtcccattacagcgatgggcggcaggtcatttggtgggagttcgagggcccagagtggatgacggctcaggagctgaaggagcgcctggagtccgagacagacccaaaggtgagctacatgctcctgcagccaatccctgagccgtccgtggacgcggataagattcctctgaggaaggaggtctacgttgtgaaccagcacggcaagacagacaagctccatccgtccgtgaagcggactcccgagtacctgccactcaacttcgagaccgctaggctgatcggcctctggattgctgaggggtcaacttccaagaacggcgtcatcaagttcgacatttccagcaatgaggaggatctgacggagttcatcacaggcactattaggaagtacttcccgcacgctaagatcgtcgttaaggaccatgagaggaacaggaggacggtccggttctgcaataagcgcttcgcggagtggctcagggagaacatcggccacggggctgataataagagcattccgcccctcctgctcctgaacaagaatagggaggtgcgcctgggcctcctgagggggctcatcgagggcgacggctacgtgcgcagggagtcgcagcgcagggcgaactacatcagctactcgacagtttctccctcactggcttaccagctccagctcctggtggcttcgctgggctacacctcgtctatccacaggtctattcggacagagggcatcgggaagactaggaagcccatctacgatgttaaggtgtcgggcaagtcttactactcactcctggaggagctcgggttcgaggtcccacagaggggcaacaggacctacaacgttaatcgcacgtggaagaattacctcctgctcaaggtgaggtccatcgaggaggaggagtacgagggcgacgtttacaatctggaggttgagggggatgagtcaggctctgtgggcttcatcgtgcataatacgtccctgggccaagtgacaatcgatggcgggacctacgacatctataggacgacacgcgtcaaccagccttccattgtggggacagccacgttcgatcagtactggagcgtgcgcacctctaagcggacttcaggaacagtgaccgtgaccgatcacttccgcgcctgggcgaaccggggcctgaacctcggcacaatagaccaaattacattgtgcgtggagggttaccaaagctctggatcagccaacatcacccagaacaccttctctcagggctcttcttccggcagttcgggtggctcatccggctccacaacgactactcgcatcgagtgtgagaacatgtccttgtccggaccctacgttagcaggatcaccaatccctttaatggtattgcgctgtacgccaacggagacacagcccgcgctaccgttaacttccccgcaagtcgcaactacaatttccgcctgcggggttgcggcaacaacaataatcttgcccgtgtggacctgaggatcgacggacggaccgtcgggaccttttattaccagggcacatacccctgggaggccccaattgacaatgtttatgtcagtgcggggagtcatacagtcgaaatcactgttactgcggataacggcacatgggacgtgtatgccgactacctggtgatacagtgactcgagggggggcccggtacccaattcgccctatagtgagtcgtattacaattcactggccgtcgttttacaacgtcgtgactgggaaaaccctggcgttacccaacttaatcgccttgcagcacatccccctttcgccagctggcgtaatagcgaagaggcccgcaccgatcgcccttcccaacagttgcgcagcctgaatggcgaatggaaattgtaagcgttaatattttgttaaaattcgcgttaaatttttgttaaatcagctcattttttaaccaataggccgaaatcggcaaaatcccttataaatcaaaagaatagaccgagatagggttgagtgttgttccagtttggaacaagagtccactattaaagaacgtggactccaacgtcaaagggcgaaaaaccgtctatcagggcgatggcccactacgtgaaccatcaccctaatcaagttttttggggtcgaggtgccgtaaagcactaaatcggaaccctaaagggagcccccgatttagagcttgacggggaaagccggcgaacgtggcgagaaaggaagggaagaaagcgaaaggagcgggcgctagggcgctggcaagtgtagcggtcacgctgcgcgtaaccaccacacccgccgcgcttaatgcgccgctacagggcgcgtcaggtg

SEQ ID NO: 3300 - DNA, 5468 bp, Artificial Sequence
  Synthetic Construct, AT-143 intein modified protein encoding nucleic acids in pBluescript
gcacttttcggggaaatgtgcgcggaacccctatttgtttatttttctaaatacattcaaatatgtatccgctcatgagacaataaccctgataaatgcttcaataatattgaaaaaggaagagtatgagtattcaacatttccgtgtcgcccttattcccttttttgcggcattttgccttcctgtttttgctcacccagaaacgctggtgaaagtaaaagatgctgaagatcagttgggtgcacgagtgggttacatcgaactggatctcaacagcggtaagatccttgagagttttcgccccgaagaacgttttccaatgatgagcacttttaaagttctgctatgtggcgcggtattatcccgtattgacgccgggcaagagcaactcggtcgccgcatacactattctcagaatgacttggttgagtactcaccagtcacagaaaagcatcttacggatggcatgacagtaagagaattatgcagtgctgccataaccatgagtgataacactgcggccaacttacttctgacaacgatcggaggaccgaaggagctaaccgcttttttgcacaacatgggggatcatgtaactcgccttgatcgttgggaaccggagctgaatgaagccataccaaacgacgagcgtgacaccacgatgcctgtagcaatggcaacaacgttgcgcaaactattaactggcgaactacttactctagcttcccggcaacaattaatagactggatggaggcggataaagttgcaggaccacttctgcgctcggcccttccggctggctggtttattgctgataaatctggagccggtgagcgtgggtctcgcggtatcattgcagcactggggccagatggtaagccctcccgtatcgtagttatctacacgacggggagtcaggcaactatggatgaacgaaatagacagatcgctgagataggtgcctcactgattaagcattggtaactgtcagaccaagtttactcatatatactttagattgatttaaaacttcatttttaatttaaaaggatctaggtgaagatcctttttgataatctcatgaccaaaatcccttaacgtgagttttcgttccactgagcgtcagaccccgtagaaaagatcaaaggatcttcttgagatcctttttttctgcgcgtaatctgctgcttgcaaacaaaaaaaccaccgctaccagcggtggtttgtttgccggatcaagagctaccaactctttttccgaaggtaactggcttcagcagagcgcagataccaaatactgtccttctagtgtagccgtagttaggccaccacttcaagaactctgtagcaccgcctacatacctcgctctgctaatcctgttaccagtggctgctgccagtggcgataagtcgtgtcttaccgggttggactcaagacgatagttaccggataaggcgcagcggtcgggctgaacggggggttcgtgcacacagcccagcttggagcgaacgacctacaccgaactgagatacctacagcgtgagctatgagaaagcgccacgcttcccgaagggagaaaggcggacaggtatccggtaagcggcagggtcggaacaggagagcgcacgagggagcttccagggggaaacgcctggtatctttatagtcctgtcgggtttcgccacctctgacttgagcgtcgatttttgtgatgctcgtcaggggggcggagcctatggaaaaacgccagcaacgcggcctttttacggttcctggccttttgctggccttttgctcacatgttctttcctgcgttatcccctgattctgtggataaccgtattaccgcctttgagtgagctgataccgctcgccgcagccgaacgaccgagcgcagcgagtcagtgagcgaggaagcggaagagcgcccaatacgcaaaccgcctctccccgcgcgttggccgattcattaatgcagctggcacgacaggtttcccgactggaaagcgggcagtgagcgcaacgcaattaatgtgagttagctcactcattaggcaccccaggctttacactttatgcttccggctcgtatgttgtgtggaattgtgagcggataacaatttcacacaggaaacagcatatgcaaacaagcattactctgacatccaacgcatccggtacgtttgacggttactattacgaactctggaaggatactggcaatacaacaatgacggtctacactcaaggtcgcttttcctgccagtggtcgaacatcaataacgcgttgtttaggaccgggaagaaatacaaccagaattggcagtctcttggcacaatccggatcacgtactctgcgacttacaacccaaacgggaactcctacttgtgtatctatggctggtctaccaacccattggtcgagttctacatcgttgagtcctgggggaactggagaccgcctggtgcctgcctgctgccggatgagaaggttattctccctgagcatgggcctattacactcaaggggctcttcgatctcgctaaggagacagtcgtggctgacaacgagaaggagatccgcaagctgggcgccaagctcaccattgtgggcgaggatgggaggctcagggtcctggagagcccatacgtttggaaggtgcggcaccgcggcaagatgctgagggtcaagctcaagaactggcactcagtgtccgtcacgccagagcatcccttcctgaccacgcggggctgggtgcgcgctgaccagctcaagccgggggattacgttgcggtgcccagggtcatccatggcaacgagtcagacgagcggttcgtctccttcgtttacgagaagctcaagaatgatgagctgatcgcgaagctccgcggcgaggtgctgtccaagatttccagcgagttcaagggggacagggcttacaaggttgagaggaacgtgttccggtgggaggacatcgagcgcctcaatctgtgggatgaggtggagagggtcgccttcaccccaaggatgcacaggagcggcaagccactgcattacgtgaagctcccaaggtcgcctgaggagtgggaggctttcttctacttcgctggcgtcatgttcggcgacgggtcccaggataagatcgccaacaatgacgtcgaggtttacgaggagctcaagaagctgtctgttctcggcgtggctgtcaagagggtggagaggacaacttcatacgagatcgagctcaccaacgggaagaatgctctcctgaggctcctgagggtgctgttcgagtacccggagcggcagaaggcgaagtccattagggttccacggatcctgttcattgctcctcgcaagtatgtgtcccgcttcctcaggggctacttcgacgcggatgggcacgtcagcctgaaggacgcgaggatcgaggttacgagcgcttcgcaggagttcctggaggatctcagcctcctgctcctgcggttcggcatcgtgtccaagatctaccgcagcgactacaccacgctcgttatctcgggccgcaggaacctcgatctgttccggcgctacattgggttctctgtcaagaataaggccgaggcgctggagaaggccatcaagaagtcaaggcggtctgagtcataccccattttcgaggagctgaagaggctccggctcctgttcggcttcacacgcactgagctcaacagcaatgtgccattctacgggaagtacgagtcggaggaggccccttcttacgagacactgatgaggatcctcgacgcgattgagaagggctcgatcaacctggataagaagattgctgtcctggaggggcgcatcagggaccataattacattaaggccttcgagaaggacggcctgatcaaggatgggaagctgactgagctcggcagggagctcctggaggtctggaggaacagggagttcgactcgtctgacgtcgattacatccggaacctggcggagaatctcgtcttcatcccggttgaggacattgaggagttcgagtacgagggctacgtttacgacgttactacagagactcataatttcgttgctaatggcatcctcgttcataatacgtccctgggccaagtgacaatcgatggcgggacctacgacatctataggacgacacgcgtcaaccagccttccattgtggggacagccacgttcgatcagtactggagcgtgcgcacctctaagcggacttcaggaacagtgaccgtgaccgatcacttccgcgcctgggcgaaccggggcctgaacctcggcacaatagaccaaattacattgtgcgtggagggttaccaaagctctggatcagccaacatcacccagaacaccttctctcagggctcttcttccggcagttcgggtggctcatccggctccacaacgactactcgcatcgagtgtgagaacatgtccttgtccggaccctacgttagcaggatcaccaatccctttaatggtattgcgctgtacgccaacggagacacagcccgcgctaccgttaacttccccgcaagtcgcaactacaatttccgcctgcggggttgcggcaacaacaataatcttgcccgtgtggacctgaggatcgacggacggaccgtcgggaccttttattaccagggcacatacccctgggaggccccaattgacaatgtttatgtcagtgcggggagtcatacagtcgaaatcactgttactgcggataacggcacatgggacgtgtatgccgactacctggtgatacagtgactcgagggggggcccggtacccaattcgccctatagtgagtcgtattacaattcactggccgtcgttttacaacgtcgtgactgggaaaaccctggcgttacccaacttaatcgccttgcagcacatccccctttcgccagctggcgtaatagcgaagaggcccgcaccgatcgcccttcccaacagttgcgcagcctgaatggcgaatggaaattgtaagcgttaatattttgttaaaattcgcgttaaatttttgttaaatcagctcattttttaaccaataggccgaaatcggcaaaatcccttataaatcaaaagaatagaccgagatagggttgagtgttgttccagtttggaacaagagtccactattaaagaacgtggactccaacgtcaaagggcgaaaaaccgtctatcagggcgatggcccactacgtgaaccatcaccctaatcaagttttttggggtcgaggtgccgtaaagcactaaatcggaaccctaaagggagcccccgatttagagcttgacggggaaagccggcgaacgtggcgagaaaggaagggaagaaagcgaaaggagcgggcgctagggcgctggcaagtgtagcggtcacgctgcgcgtaaccaccacacccgccgcgcttaatgcgccgctacagggcgcgtcaggtg

SEQ ID NO: 3301 - DNA, 5405 bp, Artificial Sequence
  Synthetic Construct, AT-144 intein modified protein encoding nucleic acids in pBluescript
gcacttttcggggaaatgtgcgcggaacccctatttgtttatttttctaaatacattcaaatatgtatccgctcatgagacaataaccctgataaatgcttcaataatattgaaaaaggaagagtatgagtattcaacatttccgtgtcgcccttattcccttttttgcggcattttgccttcctgtttttgctcacccagaaacgctggtgaaagtaaaagatgctgaagatcagttgggtgcacgagtgggttacatcgaactggatctcaacagcggtaagatccttgagagttttcgccccgaagaacgttttccaatgatgagcacttttaaagttctgctatgtggcgcggtattatcccgtattgacgccgggcaagagcaactcggtcgccgcatacactattctcagaatgacttggttgagtactcaccagtcacagaaaagcatcttacggatggcatgacagtaagagaattatgcagtgctgccataaccatgagtgataacactgcggccaacttacttctgacaacgatcggaggaccgaaggagctaaccgcttttttgcacaacatgggggatcatgtaactcgccttgatcgttgggaaccggagctgaatgaagccataccaaacgacgagcgtgacaccacgatgcctgtagcaatggcaacaacgttgcgcaaactattaactggcgaactacttactctagcttcccggcaacaattaatagactggatggaggcggataaagttgcaggaccacttctgcgctcggcccttccggctggctggtttattgctgataaatctggagccggtgagcgtgggtctcgcggtatcattgcagcactggggccagatggtaagccctcccgtatcgtagttatctacacgacggggagtcaggcaactatggatgaacgaaatagacagatcgctgagataggtgcctcactgattaagcattggtaactgtcagaccaagtttactcatatatactttagattgatttaaaacttcatttttaatttaaaaggatctaggtgaagatcctttttgataatctcatgaccaaaatcccttaacgtgagttttcgttccactgagcgtcagaccccgtagaaaagatcaaaggatcttcttgagatcctttttttctgcgcgtaatctgctgcttgcaaacaaaaaaaccaccgctaccagcggtggtttgtttgccggatcaagagctaccaactctttttccgaaggtaactggcttcagcagagcgcagataccaaatactgtccttctagtgtagccgtagttaggccaccacttcaagaactctgtagcaccgcctacatacctcgctctgctaatcctgttaccagtggctgctgccagtggcgataagtcgtgtcttaccgggttggactcaagacgatagttaccggataaggcgcagcggtcgggctgaacggggggttcgtgcacacagcccagcttggagcgaacgacctacaccgaactgagatacctacagcgtgagctatgagaaagcgccacgcttcccgaagggagaaaggcggacaggtatccggtaagcggcagggtcggaacaggagagcgcacgagggagcttccagggggaaacgcctggtatctttatagtcctgtcgggtttcgccacctctgacttgagcgtcgatttttgtgatgctcgtcaggggggcggagcctatggaaaaacgccagcaacgcggcctttttacggttcctggccttttgctggccttttgctcacatgttctttcctgcgttatcccctgattctgtggataaccgtattaccgcctttgagtgagctgataccgctcgccgcagccgaacgaccgagcgcagcgagtcagtgagcgaggaagcggaagagcgcccaatacgcaaaccgcctctccccgcgcgttggccgattcattaatgcagctggcacgacaggtttcccgactggaaagcgggcagtgagcgcaacgcaattaatgtgagttagctcactcattaggcaccccaggctttacactttatgcttccggctcgtatgttgtgtggaattgtgagcggataacaatttcacacaggaaacagcatatgcaaacaagcattactctgacatccaacgcatccggtacgtttgacggttactattacgaactctggaaggatactggcaatacaacaatgacggtctacactcaaggtcgcttttcctgccagtggtcgaacatcaataacgcgttgtttaggaccgggaagaaatacaaccagaattggcagtctcttggcacaatccggatcacgtactctgcgacttacaacccaaacgggaactcctacttgtgtatctatggctggtctaccaacccattggtcgagttctacatcgttgagtcctgggggaactggagaccgcctggtgcctgcgtttcgggggactcaaagatcctgacagggaaggggccagtggagatcgggcggctgaactctaacatgatcgcgggcatttggcgcttccagaccgagctggtgcggttcgaggagccacaccgcgttgagtaccgcagggagggcgtgaagatccgcacgaggctcgggttcgagattaaggccaccaaggagcataagttcctcacggtggacgagaacggcgagctgcgctgggtcgaggcttggaagctcaaggagggcaactgggtcggggtggtccggcgcctgccatctcctaatgtgaaggtctcaatcctcgacctcctgccgcccaacgcctacctcaagctgaagggcgagttcctgagggagctcaagctgtcgatccaggcgaagttcggctctattaggacatacgccaagaagaagcgctggtcagagtcctacctcgtcaagcagctgaatggcgtttacccgttcaggtgggagaggctctccgctgtgctgaaggacctcgatctgcgcatgacagagaacgacgtcgagaggatcacttccgataagggcaagtacagcctcccgatcgagttcaccccctcaatggctaggctcctgggcttctggatggctgacgggtcctggaagggcgggaccctcacgctgttctccagcgataggaagatgctggagaagtacaaggagctgtgcaaggaggagttcggcgttgtggggcggatccgcatgctcaacgagtctacatactcactggagatctctttcaatctcctgccggctattttcaagaacctgacaggcaatactgagcgcaagagcaagctcgggactttcccatccatcatctacagcctgcctgaggagcacaagagggagttcctcgcgggctacttcgacggcgatgggttcctggaggttaagggcgggagggtgtactcggctggcttctctaccttcaacaagaggttcgcggagggcatccgggacattctcctgcagctcgggatcgtgtcgtctattagggcccgggagtacgatgaggtccagaagttcaagggccgcgttatccccaagaagggggcttcatacacggtttccgtgctcggcggggagtacctgaagaggttcttcgacgccgtccgcccatggaggtcggattacgagggctgggaggggatgtacaacgagggctacagcaattcggacgtcgttcccaacctcggcaagcgcctgaggagcatcagggagaggctgggcattagcgcttaccgcatgtcgaagatggggttctacaatccagtccgcgttgagctgggcgagagggagatctccaggcggaacctcaggctcctggtggagttctacgagcgggtcgcgaaggagaagcgcgtggaggacgtcctggaggagctgagctacctcagggagctggctgagggcgacgtgttcttcgatcgcatcacgtcggtggagcctgcctacattgatgtcgcgtacggcatcatcaactcggagacagagaactacatcgtggagggcttcatttccaagaacacgtccctgggccaagtgacaatcgatggcgggacctacgacatctataggacgacacgcgtcaaccagccttccattgtggggacagccacgttcgatcagtactggagcgtgcgcacctctaagcggacttcaggaacagtgaccgtgaccgatcacttccgcgcctgggcgaaccggggcctgaacctcggcacaatagaccaaattacattgtgcgtggagggttaccaaagctctggatcagccaacatcacccagaacaccttctctcagggctcttcttccggcagttcgggtggctcatccggctccacaacgactactcgcatcgagtgtgagaacatgtccttgtccggaccctacgttagcaggatcaccaatccctttaatggtattgcgctgtacgccaacggagacacagcccgcgctaccgttaacttccccgcaagtcgcaactacaatttccgcctgcggggttgcggcaacaacaataatcttgcccgtgtggacctgaggatcgacggacggaccgtcgggaccttttattaccagggcacatacccctgggaggccccaattgacaatgtttatgtcagtgcggggagtcatacagtcgaaatcactgttactgcggataacggcacatgggacgtgtatgccgactacctggtgatacagtgactcgagggggggcccggtacccaattcgccctatagtgagtcgtattacaattcactggccgtcgttttacaacgtcgtgactgggaaaaccctggcgttacccaacttaatcgccttgcagcacatccccctttcgccagctggcgtaatagcgaagaggcccgcaccgatcgcccttcccaacagttgcgcagcctgaatggcgaatggaaattgtaagcgttaatattttgttaaaattcgcgttaaatttttgttaaatcagctcattttttaaccaataggccgaaatcggcaaaatcccttataaatcaaaagaatagaccgagatagggttgagtgttgttccagtttggaacaagagtccactattaaagaacgtggactccaacgtcaaagggcgaaaaaccgtctatcagggcgatggcccactacgtgaaccatcaccctaatcaagttttttggggtcgaggtgccgtaaagcactaaatcggaaccctaaagggagcccccgatttagagcttgacggggaaagccggcgaacgtggcgagaaaggaagggaagaaagcgaaaggagcgggcgctagggcgctggcaagtgtagcggtcacgctgcgcgtaaccaccacacccgccgcgcttaatgcgccgctacagggcgcgtcaggtg

SEQ ID NO: 3302 - DNA, 5438 bp, Artificial Sequence
  Synthetic Construct, AT-145 intein modified protein encoding nucleic acids in pBluescript
gcacttttcggggaaatgtgcgcggaacccctatttgtttatttttctaaatacattcaaatatgtatccgctcatgagacaataaccctgataaatgcttcaataatattgaaaaaggaagagtatgagtattcaacatttccgtgtcgcccttattcccttttttgcggcattttgccttcctgtttttgctcacccagaaacgctggtgaaagtaaaagatgctgaagatcagttgggtgcacgagtgggttacatcgaactggatctcaacagcggtaagatccttgagagttttcgccccgaagaacgttttccaatgatgagcacttttaaagttctgctatgtggcgcggtattatcccgtattgacgccgggcaagagcaactcggtcgccgcatacactattctcagaatgacttggttgagtactcaccagtcacagaaaagcatcttacggatggcatgacagtaagagaattatgcagtgctgccataaccatgagtgataacactgcggccaacttacttctgacaacgatcggaggaccgaaggagctaaccgcttttttgcacaacatgggggatcatgtaactcgccttgatcgttgggaaccggagctgaatgaagccataccaaacgacgagcgtgacaccacgatgcctgtagcaatggcaacaacgttgcgcaaactattaactggcgaactacttactctagcttcccggcaacaattaatagactggatggaggcggataaagttgcaggaccacttctgcgctcggcccttccggctggctggtttattgctgataaatctggagccggtgagcgtgggtctcgcggtatcattgcagcactggggccagatggtaagccctcccgtatcgtagttatctacacgacggggagtcaggcaactatggatgaacgaaatagacagatcgctgagataggtgcctcactgattaagcattggtaactgtcagaccaagtttactcatatatactttagattgatttaaaacttcatttttaatttaaaaggatctaggtgaagatcctttttgataatctcatgaccaaaatcccttaacgtgagttttcgttccactgagcgtcagaccccgtagaaaagatcaaaggatcttcttgagatcctttttttctgcgcgtaatctgctgcttgcaaacaaaaaaaccaccgctaccagcggtggtttgtttgccggatcaagagctaccaactctttttccgaaggtaactggcttcagcagagcgcagataccaaatactgtccttctagtgtagccgtagttaggccaccacttcaagaactctgtagcaccgcctacatacctcgctctgctaatcctgttaccagtggctgctgccagtggcgataagtcgtgtcttaccgggttggactcaagacgatagttaccggataaggcgcagcggtcgggctgaacggggggttcgtgcacacagcccagcttggagcgaacgacctacaccgaactgagatacctacagcgtgagctatgagaaagcgccacgcttcccgaagggagaaaggcggacaggtatccggtaagcggcagggtcggaacaggagagcgcacgagggagcttccagggggaaacgcctggtatctttatagtcctgtcgggtttcgccacctctgacttgagcgtcgatttttgtgatgctcgtcaggggggcggagcctatggaaaaacgccagcaacgcggcctttttacggttcctggccttttgctggccttttgctcacatgttctttcctgcgttatcccctgattctgtggataaccgtattaccgcctttgagtgagctgataccgctcgccgcagccgaacgaccgagcgcagcgagtcagtgagcgaggaagcggaagagcgcccaatacgcaaaccgcctctccccgcgcgttggccgattcattaatgcagctggcacgacaggtttcccgactggaaagcgggcagtgagcgcaacgcaattaatgtgagttagctcactcattaggcaccccaggctttacactttatgcttccggctcgtatgttgtgtggaattgtgagcggataacaatttcacacaggaaacagcatatgcaaacaagcattactctgacatccaacgcatccggtacgtttgacggttactattacgaactctggaaggatactggcaatacaacaatgacggtctacactcaaggtcgcttttcctgccagtggtcgaacatcaataacgcgttgtttaggaccgggaagaaatacaaccagaattggcagtctcttggcacaatccggatcacgtactctgcgacttacaacccaaacgggaactcctacttgtgtatctatggctggtctaccaacccattggtcgagttctacatcgttgagtcctgggggaactggagaccgcctggtgcctctattctgcctgaggagtggctgcctgttctggaggagggggaggttcatttcgttaggatcggggagctgattgaccgcatgatggaggagaacgctggcaaggtcaagagggagggggagaccgaggtcctggaggtttcaggcctggaggtgccgtccttcaaccgcaggacgaataaggcggagctgaagagggtcaaggctctcatccggcacgactactctggcaaggtgtacaccattaggctgaagtcaggccggcgcatcaagattacgtcagggcattccctgttcagcgtccggaacggcgagctcgttgaggtgaccggcgacgagctgaagccaggggatctcgtcgctgttccaaggaggctggagctgccagagaggaaccacgtcctcaatctggttgagctcctgctcggcacaccggaggaggagactctggacatcgtgatgacgattcccgtcaagggcaagaagaacttcttcaaggggatgctcaggacactgcggtggatcttcggcgaggagaagaggccaaggactgctcgcaggtacctcaggcatctggaggacctcggctacgtgcggctcaagaagatcgggtacgaggtcctggactgggatagcctcaagaattaccggcgcctgtacgaggctctcgtggagaacgtccgctacaacggcaataagagggagtacctggttgagttcaattcgatccgcgacgccgtggggattatgccgctgaaggagctcaaggagtggaagatcggcacactcaacgggttccggatgcgcaagctgattgaggtcgatgagtccctcgccaagctgctcggctactacgtgagcgaggggtacgcgcgcaagcagaggaacccgaagaatggctggtcgtactctgtcaagctgtacaatgaggaccccgaggttctggacgatatggagcggctcgcgagccgcttcttcggcaaggttaggcgggggaggaactacgtggagatccccaagaagattggctacctgctcttcgagaatatgtgcggggtgctcgctgagaacaagcgcatcccagagttcgtcttcacatcacctaagggcgttaggctggccttcctggaggggtactccagcgctatggctacctccacggagcaggagactcaggcgctgaacgagaagcgcgctctggccaatcagctcgttctgctcctgaactcggtgggcgtctctgctgtgaagctcggccacgactccggggtttacagggtgtacatcaatgaggagctgccattcgtcaagctcgataagaagaagaacgcttactacagccatgtgattcctaaggaggtcctctcggaggtcttcggcaaggttttccagaagaacgtgtccccacagaccttccggaagatggtcgaggacggcaggctggatcctgagaaggctcagaggctgtcgtggctcatcgagggggacgtggtcctcgatcgcgtcgagtctgttgacgtggaggactacgatggctacgtgtacgatctctctgtggaggataatgagaacttcctcgtgggcttcgggctcgtttacgctcataatacgtccctgggccaagtgacaatcgatggcgggacctacgacatctataggacgacacgcgtcaaccagccttccattgtggggacagccacgttcgatcagtactggagcgtgcgcacctctaagcggacttcaggaacagtgaccgtgaccgatcacttccgcgcctgggcgaaccggggcctgaacctcggcacaatagaccaaattacattgtgcgtggagggttaccaaagctctggatcagccaacatcacccagaacaccttctctcagggctcttcttccggcagttcgggtggctcatccggctccacaacgactactcgcatcgagtgtgagaacatgtccttgtccggaccctacgttagcaggatcaccaatccctttaatggtattgcgctgtacgccaacggagacacagcccgcgctaccgttaacttccccgcaagtcgcaactacaatttccgcctgcggggttgcggcaacaacaataatcttgcccgtgtggacctgaggatcgacggacggaccgtcgggaccttttattaccagggcacatacccctgggaggccccaattgacaatgtttatgtcagtgcggggagtcatacagtcgaaatcactgttactgcggataacggcacatgggacgtgtatgccgactacctggtgatacagtgactcgagggggggcccggtacccaattcgccctatagtgagtcgtattacaattcactggccgtcgttttacaacgtcgtgactgggaaaaccctggcgttacccaacttaatcgccttgcagcacatccccctttcgccagctggcgtaatagcgaagaggcccgcaccgatcgcccttcccaacagttgcgcagcctgaatggcgaatggaaattgtaagcgttaatattttgttaaaattcgcgttaaatttttgttaaatcagctcattttttaaccaataggccgaaatcggcaaaatcccttataaatcaaaagaatagaccgagatagggttgagtgttgttccagtttggaacaagagtccactattaaagaacgtggactccaacgtcaaagggcgaaaaaccgtctatcagggcgatggcccactacgtgaaccatcaccctaatcaagttttttggggtcgaggtgccgtaaagcactaaatcggaaccctaaagggagcccccgatttagagcttgacggggaaagccggcgaacgtggcgagaaaggaagggaagaaagcgaaaggagcgggcgctagggcgctggcaagtgtagcggtcacgctgcgcgtaaccaccacacccgccgcgcttaatgcgccgctacagggcgcgtcaggtg

SEQ ID NO: 3303 - DNA, 5276 bp, Artificial Sequence
  Synthetic Construct, AT-146 intein modified protein encoding nucleic acids in pBluescript
gcacttttcggggaaatgtgcgcggaacccctatttgtttatttttctaaatacattcaaatatgtatccgctcatgagacaataaccctgataaatgcttcaataatattgaaaaaggaagagtatgagtattcaacatttccgtgtcgcccttattcccttttttgcggcattttgccttcctgtttttgctcacccagaaacgctggtgaaagtaaaagatgctgaagatcagttgggtgcacgagtgggttacatcgaactggatctcaacagcggtaagatccttgagagttttcgccccgaagaacgttttccaatgatgagcacttttaaagttctgctatgtggcgcggtattatcccgtattgacgccgggcaagagcaactcggtcgccgcatacactattctcagaatgacttggttgagtactcaccagtcacagaaaagcatcttacggatggcatgacagtaagagaattatgcagtgctgccataaccatgagtgataacactgcggccaacttacttctgacaacgatcggaggaccgaaggagctaaccgcttttttgcacaacatgggggatcatgtaactcgccttgatcgttgggaaccggagctgaatgaagccataccaaacgacgagcgtgacaccacgatgcctgtagcaatggcaacaacgttgcgcaaactattaactggcgaactacttactctagcttcccggcaacaattaatagactggatggaggcggataaagttgcaggaccacttctgcgctcggcccttccggctggctggtttattgctgataaatctggagccggtgagcgtgggtctcgcggtatcattgcagcactggggccagatggtaagccctcccgtatcgtagttatctacacgacggggagtcaggcaactatggatgaacgaaatagacagatcgctgagataggtgcctcactgattaagcattggtaactgtcagaccaagtttactcatatatactttagattgatttaaaacttcatttttaatttaaaaggatctaggtgaagatcctttttgataatctcatgaccaaaatcccttaacgtgagttttcgttccactgagcgtcagaccccgtagaaaagatcaaaggatcttcttgagatcctttttttctgcgcgtaatctgctgcttgcaaacaaaaaaaccaccgctaccagcggtggtttgtttgccggatcaagagctaccaactctttttccgaaggtaactggcttcagcagagcgcagataccaaatactgtccttctagtgtagccgtagttaggccaccacttcaagaactctgtagcaccgcctacatacctcgctctgctaatcctgttaccagtggctgctgccagtggcgataagtcgtgtcttaccgggttggactcaagacgatagttaccggataaggcgcagcggtcgggctgaacggggggttcgtgcacacagcccagcttggagcgaacgacctacaccgaactgagatacctacagcgtgagctatgagaaagcgccacgcttcccgaagggagaaaggcggacaggtatccggtaagcggcagggtcggaacaggagagcgcacgagggagcttccagggggaaacgcctggtatctttatagtcctgtcgggtttcgccacctctgacttgagcgtcgatttttgtgatgctcgtcaggggggcggagcctatggaaaaacgccagcaacgcggcctttttacggttcctggccttttgctggccttttgctcacatgttctttcctgcgttatcccctgattctgtggataaccgtattaccgcctttgagtgagctgataccgctcgccgcagccgaacgaccgagcgcagcgagtcagtgagcgaggaagcggaagagcgcccaatacgcaaaccgcctctccccgcgcgttggccgattcattaatgcagctggcacgacaggtttcccgactggaaagcgggcagtgagcgcaacgcaattaatgtgagttagctcactcattaggcaccccaggctttacactttatgcttccggctcgtatgttgtgtggaattgtgagcggataacaatttcacacaggaaacagcatatgcaaacaagcattactctgacatccaacgcatccggtacgtttgacggttactattacgaactctggaaggatactggcaatacaacaatgacggtctacactcaaggtcgcttttcctgccagtggtcgaacatcaataacgcgttgtttaggaccgggaagaaatacaaccagaattggcagtctcttggcacaatccggatcacgtactctgcgacttacaacccaaacgggaactcctacttgtgtatctatggctggtctaccaacccattggtcgagttctacatcgttgagtcctgggggaactggagaccgcctggtgcctgcttcgctaaggacactaaggtctactacgagaatgacacactggttcatttcgagtcaattgaggacatgtaccataagtacgcttctctcgggagggaggtgccattcgacaacggctacgctgtcccactggagaccgtgtcagtctacacgttcgatccgaagacaggcgaggttaagaggacgaaggctagctacatctaccgggagaaggtggagaagctcgccgagatccgcctgtcgaacggctacctcctgaggattacactcctgcaccccgttctcgtgttccggaatggcctgcagtgggtgccagctggcatgatcaagcctggggacctcatcgtcggcattcgctcggttccagcgaacgccgcgactattgaggagtctgaggcctacttcctcgggctgttcgtggctgagggcacctcaaatcctctctccatcaccacgggctccgaggagctgaaggacttcatcgtcagcttcattgaggaccatgatgggtacacaccaactgtcgaggttcgcaggggcctctaccggatcctgttccgcaagaagacggctgagtggctcggcgagctggctacttcgaacgcctctaccaaggtggtccctgagagggtcctcaatgcgggggagtccgctatcgctgccttcctcgctggctacctggacggcgatgggtacctcactgagtctattgtggagctggtcaccaagtcacgggagctcgctgacgggctggtgttcctcctgaagcgcctgggcatcacgccgaggattagccagaagacaatcgaggggtcggtctactaccggatctacattacgggcgaggatcgcaagacattcgagaaggtcctggagaagtccaggatcaagccaggggagatgaacgagggcggggttggcaggtacccaccagctctgggcaagttcctcgggaagctgtacagcgagttcaggctccccaagcgggacaacgagactgcgtaccacatcctgaccaggtcacggaatgtgtggttcaccgagaagacgctctcccggattgaggagtacttcagggaggctctggagaagctgtcggaggctaggaaggctctggagatgggcgacaagccggagctgccattcccttggacagcgatcactaagtacgggttcacggatcgccaggtcgctaactacaggacaaggggcctcccaaagaggccagagctgaaggagaaggttgtgtccgccctcctgaaggagatcgagaggctggagggcgtggctaagctcgctctggagaccattgagctcgctaggcgcctggagttccatgaggtttccagcgtggaggtcgttgactacaatgattgggtctacgatctcgtcattccagagactcataacttcattgctccaaatgggctcgtgctccacaacacgtccctgggccaagtgacaatcgatggcgggacctacgacatctataggacgacacgcgtcaaccagccttccattgtggggacagccacgttcgatcagtactggagcgtgcgcacctctaagcggacttcaggaacagtgaccgtgaccgatcacttccgcgcctgggcgaaccggggcctgaacctcggcacaatagaccaaattacattgtgcgtggagggttaccaaagctctggatcagccaacatcacccagaacaccttctctcagggctcttcttccggcagttcgggtggctcatccggctccacaacgactactcgcatcgagtgtgagaacatgtccttgtccggaccctacgttagcaggatcaccaatccctttaatggtattgcgctgtacgccaacggagacacagcccgcgctaccgttaacttccccgcaagtcgcaactacaatttccgcctgcggggttgcggcaacaacaataatcttgcccgtgtggacctgaggatcgacggacggaccgtcgggaccttttattaccagggcacatacccctgggaggccccaattgacaatgtttatgtcagtgcggggagtcatacagtcgaaatcactgttactgcggataacggcacatgggacgtgtatgccgactacctggtgatacagtgactcgagggggggcccggtacccaattcgccctatagtgagtcgtattacaattcactggccgtcgttttacaacgtcgtgactgggaaaaccctggcgttacccaacttaatcgccttgcagcacatccccctttcgccagctggcgtaatagcgaagaggcccgcaccgatcgcccttcccaacagttgcgcagcctgaatggcgaatggaaattgtaagcgttaatattttgttaaaattcgcgttaaatttttgttaaatcagctcattttttaaccaataggccgaaatcggcaaaatcccttataaatcaaaagaatagaccgagatagggttgagtgttgttccagtttggaacaagagtccactattaaagaacgtggactccaacgtcaaagggcgaaaaaccgtctatcagggcgatggcccactacgtgaaccatcaccctaatcaagttttttggggtcgaggtgccgtaaagcactaaatcggaaccctaaagggagcccccgatttagagcttgacggggaaagccggcgaacgtggcgagaaaggaagggaagaaagcgaaaggagcgggcgctagggcgctggcaagtgtagcggtcacgctgcgcgtaaccaccacacccgccgcgcttaatgcgccgctacagggcgcgtcaggtg

SEQ ID NO: 3304 - DNA, 5297 bp, Artificial Sequence
  Synthetic Construct, AT-147 intein modified protein encoding nucleic acids in pBluescript
gcacttttcggggaaatgtgcgcggaacccctatttgtttatttttctaaatacattcaaatatgtatccgctcatgagacaataaccctgataaatgcttcaataatattgaaaaaggaagagtatgagtattcaacatttccgtgtcgcccttattcccttttttgcggcattttgccttcctgtttttgctcacccagaaacgctggtgaaagtaaaagatgctgaagatcagttgggtgcacgagtgggttacatcgaactggatctcaacagcggtaagatccttgagagttttcgccccgaagaacgttttccaatgatgagcacttttaaagttctgctatgtggcgcggtattatcccgtattgacgccgggcaagagcaactcggtcgccgcatacactattctcagaatgacttggttgagtactcaccagtcacagaaaagcatcttacggatggcatgacagtaagagaattatgcagtgctgccataaccatgagtgataacactgcggccaacttacttctgacaacgatcggaggaccgaaggagctaaccgcttttttgcacaacatgggggatcatgtaactcgccttgatcgttgggaaccggagctgaatgaagccataccaaacgacgagcgtgacaccacgatgcctgtagcaatggcaacaacgttgcgcaaactattaactggcgaactacttactctagcttcccggcaacaattaatagactggatggaggcggataaagttgcaggaccacttctgcgctcggcccttccggctggctggtttattgctgataaatctggagccggtgagcgtgggtctcgcggtatcattgcagcactggggccagatggtaagccctcccgtatcgtagttatctacacgacggggagtcaggcaactatggatgaacgaaatagacagatcgctgagataggtgcctcactgattaagcattggtaactgtcagaccaagtttactcatatatactttagattgatttaaaacttcatttttaatttaaaaggatctaggtgaagatcctttttgataatctcatgaccaaaatcccttaacgtgagttttcgttccactgagcgtcagaccccgtagaaaagatcaaaggatcttcttgagatcctttttttctgcgcgtaatctgctgcttgcaaacaaaaaaaccaccgctaccagcggtggtttgtttgccggatcaagagctaccaactctttttccgaaggtaactggcttcagcagagcgcagataccaaatactgtccttctagtgtagccgtagttaggccaccacttcaagaactctgtagcaccgcctacatacctcgctctgctaatcctgttaccagtggctgctgccagtggcgataagtcgtgtcttaccgggttggactcaagacgatagttaccggataaggcgcagcggtcgggctgaacggggggttcgtgcacacagcccagcttggagcgaacgacctacaccgaactgagatacctacagcgtgagctatgagaaagcgccacgcttcccgaagggagaaaggcggacaggtatccggtaagcggcagggtcggaacaggagagcgcacgagggagcttccagggggaaacgcctggtatctttatagtcctgtcgggtttcgccacctctgacttgagcgtcgatttttgtgatgctcgtcaggggggcggagcctatggaaaaacgccagcaacgcggcctttttacggttcctggccttttgctggccttttgctcacatgttctttcctgcgttatcccctgattctgtggataaccgtattaccgcctttgagtgagctgataccgctcgccgcagccgaacgaccgagcgcagcgagtcagtgagcgaggaagcggaagagcgcccaatacgcaaaccgcctctccccgcgcgttggccgattcattaatgcagctggcacgacaggtttcccgactggaaagcgggcagtgagcgcaacgcaattaatgtgagttagctcactcattaggcaccccaggctttacactttatgcttccggctcgtatgttgtgtggaattgtgagcggataacaatttcacacaggaaacagcatatgcaaacaagcattactctgacatccaacgcatccggtacgtttgacggttactattacgaactctggaaggatactggcaatacaacaatgacggtctacactcaaggtcgcttttcctgccagtggtcgaacatcaataacgcgttgtttaggaccgggaagaaatacaaccagaattggcagtctcttggcacaatccggatcacgtactctgcgacttacaacccaaacgggaactcctacttgtgtatctatggctggtctaccaacccattggtcgagttctacatcgttgagtcctgggggaactggagaccgcctggtgcctgcgttacccctgacacactcgtttcgctcgctgacgggcggattatggagatcaaggatgcggtggagaagtcggagggcaatctgctcagcgtgaacggcctgaagccgaaggaggccaaggcgctcaagttctgggagatcgactggaacgggcccctcaaggtcatcaagctgaagaatggccacgagattaaggccacgccagaccatgggctcctggtcatgagggagggcaagctggggtgggtttcggcgaagaacgtgagggagggcgactacgtcgctttcgcttacaataccggccacagggggagggatgagtacacgctcctgaagctcatgatcaagctgggcattaccgacgtgatggtcgagctcgatgaggagtacttcaacgagaaggttgcccctatcgtgagggagcggatttccacaagcactaagtacaagtacctgaggaggagggtcctcccactgtacctcctgcaggagtggggcctggacgattacgaggcccatgttaagtccctctacaggcagagggctggcagcaagccaatccccaatttcaagctcgacggcaggttctggtatgtgttcgggctcgttctgggcgacgggacactccgcgatagcaaggtgctgatctcgcagactccactcaaggacgtcaagtccgttctggaggatgtcttccctttcctcagggttttcgagaccacgaaccaggttggcttctccaactccatcatcgctgaggtgttccgcaggctcggcgctaggaaggggaagctccacccactggtcttcggcctgagggaggagtacatcaacgcgatgattgctggctacttcgacaccgatgggacgttctctatcctcaacgacaggaagggcccaaatttccgggggatcctgacatcaaagcggggcgatgtgctccgcatgctgtccgtctacctgtaccagatcggcattatgaactacctcaggagggacgagaggaccggggtgtgggatctgatcatttcaaatcgctccctggagaagttcagggagaagatctacccgtacctccggattaggcgggctcagttcgacgaggcctactctgtctacagggcctcacgcagggctttcgagggcgatctcctgccagtggcccctgtcttcggcaagctgaagttcaagaacgggacaaagaatcgcatcctcaaggagactggcattgacgtgtggaactggctgaagaggccagagggggagatcccccgcgataagctctccaaggtcctggagtacgctgaggagtcgcccgagaaggagttcctcaagtctctggtggaggcgggcgtcacctgggttaaggtgaagggggtggaggaggagctgtacacgggcaagctctacgacttcacaactactacggagaatttcctctcaaatggggctgtttctcataatacgtccctgggccaagtgacaatcgatggcgggacctacgacatctataggacgacacgcgtcaaccagccttccattgtggggacagccacgttcgatcagtactggagcgtgcgcacctctaagcggacttcaggaacagtgaccgtgaccgatcacttccgcgcctgggcgaaccggggcctgaacctcggcacaatagaccaaattacattgtgcgtggagggttaccaaagctctggatcagccaacatcacccagaacaccttctctcagggctcttcttccggcagttcgggtggctcatccggctccacaacgactactcgcatcgagtgtgagaacatgtccttgtccggaccctacgttagcaggatcaccaatccctttaatggtattgcgctgtacgccaacggagacacagcccgcgctaccgttaacttccccgcaagtcgcaactacaatttccgcctgcggggttgcggcaacaacaataatcttgcccgtgtggacctgaggatcgacggacggaccgtcgggaccttttattaccagggcacatacccctgggaggccccaattgacaatgtttatgtcagtgcggggagtcatacagtcgaaatcactgttactgcggataacggcacatgggacgtgtatgccgactacctggtgatacagtgactcgagggggggcccggtacccaattcgccctatagtgagtcgtattacaattcactggccgtcgttttacaacgtcgtgactgggaaaaccctggcgttacccaacttaatcgccttgcagcacatccccctttcgccagctggcgtaatagcgaagaggcccgcaccgatcgcccttcccaacagttgcgcagcctgaatggcgaatggaaattgtaagcgttaatattttgttaaaattcgcgttaaatttttgttaaatcagctcattttttaaccaataggccgaaatcggcaaaatcccttataaatcaaaagaatagaccgagatagggttgagtgttgttccagtttggaacaagagtccactattaaagaacgtggactccaacgtcaaagggcgaaaaaccgtctatcagggcgatggcccactacgtgaaccatcaccctaatcaagttttttggggtcgaggtgccgtaaagcactaaatcggaaccctaaagggagcccccgatttagagcttgacggggaaagccggcgaacgtggcgagaaaggaagggaagaaagcgaaaggagcgggcgctagggcgctggcaagtgtagcggtcacgctgcgcgtaaccaccacacccgccgcgcttaatgcgccgctacagggcgcgtcaggtg

SEQ ID NO: 3305 - DNA, 5192 bp, Artificial Sequence
  Synthetic Construct, AT-148 intein modified protein encoding nucleic acids in pBluescript
gcacttttcggggaaatgtgcgcggaacccctatttgtttatttttctaaatacattcaaatatgtatccgctcatgagacaataaccctgataaatgcttcaataatattgaaaaaggaagagtatgagtattcaacatttccgtgtcgcccttattcccttttttgcggcattttgccttcctgtttttgctcacccagaaacgctggtgaaagtaaaagatgctgaagatcagttgggtgcacgagtgggttacatcgaactggatctcaacagcggtaagatccttgagagttttcgccccgaagaacgttttccaatgatgagcacttttaaagttctgctatgtggcgcggtattatcccgtattgacgccgggcaagagcaactcggtcgccgcatacactattctcagaatgacttggttgagtactcaccagtcacagaaaagcatcttacggatggcatgacagtaagagaattatgcagtgctgccataaccatgagtgataacactgcggccaacttacttctgacaacgatcggaggaccgaaggagctaaccgcttttttgcacaacatgggggatcatgtaactcgccttgatcgttgggaaccggagctgaatgaagccataccaaacgacgagcgtgacaccacgatgcctgtagcaatggcaacaacgttgcgcaaactattaactggcgaactacttactctagcttcccggcaacaattaatagactggatggaggcggataaagttgcaggaccacttctgcgctcggcccttccggctggctggtttattgctgataaatctggagccggtgagcgtgggtctcgcggtatcattgcagcactggggccagatggtaagccctcccgtatcgtagttatctacacgacggggagtcaggcaactatggatgaacgaaatagacagatcgctgagataggtgcctcactgattaagcattggtaactgtcagaccaagtttactcatatatactttagattgatttaaaacttcatttttaatttaaaaggatctaggtgaagatcctttttgataatctcatgaccaaaatcccttaacgtgagttttcgttccactgagcgtcagaccccgtagaaaagatcaaaggatcttcttgagatcctttttttctgcgcgtaatctgctgcttgcaaacaaaaaaaccaccgctaccagcggtggtttgtttgccggatcaagagctaccaactctttttccgaaggtaactggcttcagcagagcgcagataccaaatactgtccttctagtgtagccgtagttaggccaccacttcaagaactctgtagcaccgcctacatacctcgctctgctaatcctgttaccagtggctgctgccagtggcgataagtcgtgtcttaccgggttggactcaagacgatagttaccggataaggcgcagcggtcgggctgaacggggggttcgtgcacacagcccagcttggagcgaacgacctacaccgaactgagatacctacagcgtgagctatgagaaagcgccacgcttcccgaagggagaaaggcggacaggtatccggtaagcggcagggtcggaacaggagagcgcacgagggagcttccagggggaaacgcctggtatctttatagtcctgtcgggtttcgccacctctgacttgagcgtcgatttttgtgatgctcgtcaggggggcggagcctatggaaaaacgccagcaacgcggcctttttacggttcctggccttttgctggccttttgctcacatgttctttcctgcgttatcccctgattctgtggataaccgtattaccgcctttgagtgagctgataccgctcgccgcagccgaacgaccgagcgcagcgagtcagtgagcgaggaagcggaagagcgcccaatacgcaaaccgcctctccccgcgcgttggccgattcattaatgcagctggcacgacaggtttcccgactggaaagcgggcagtgagcgcaacgcaattaatgtgagttagctcactcattaggcaccccaggctttacactttatgcttccggctcgtatgttgtgtggaattgtgagcggataacaatttcacacaggaaacagcatatgcaaacaagcattactctgacatccaacgcatccggtacgtttgacggttactattacgaactctggaaggatactggcaatacaacaatgacggtctacactcaaggtcgcttttcctgccagtggtcgaacatcaataacgcgttgtttaggaccgggaagaaatacaaccagaattggcagtctcttggcacaatccggatcacgtactctgcgacttacaacccaaacgggaactcctacttgtgtatctatggctggtctaccaacccattggtcgagttctacatcgttgagtcctgggggaactggagaccgcctggtgcctgcatcgatggcaacgctaagattattttcgagaatgacggggaggagcatattatgacaatggcggagatgtacgagcgctacaaggatctgggcgagttctacgacccggagtacaaccggtgggggatcaatgtggaggaggttccggtctacgtgaagtcattcgatccctccaccaaggagattacgaagggcaaggtgaaggtcatctggaagtacgagctcggggaggacgttcccaagtacgagatcaagacaaacaagggcactagggtcctcacctcgccatggcaccctttcttcgtcattacgcaggatctgaagatcgttgagaagcgggctgatgagctcagggagggcgacatgctggtcggcgggatgccatctgacgatgactacgagttcctcctggactactggctcgccggcttcattgcgggcgatgggagcatcgacaagtaccgctcgcacgttaagggccatgagtatgtgtacgatcggctgcgcatctacgactacaccacggagacgctcggcatcattaacgaccacctggagaagacattcgggaagaggtactccctccagagggatcggaatatccactacatcgacattaaggccaagggcattactagccattacatcgagctcctgcgcggcatcaccaacgggattccgcagcccatcctgaaggagggcaggaatgctgtgctctctttcatcacgggcctgttcgatgccgaggggcatgtcaactcaaagccaggcgtggagctcgggatggtcaataggaagctgatcgaggacattacatactacctcaacagcctgggcatcaaggcgcgcatgaggaagaagcctcggaaggatggggtggactacgtcatgcacgttgaggagtactccagcctcctgcggttctacgagctcattggcaagaacctgcagaactccgagaagcgcatcaagctggaggagctcctgtctaagcataacggcgggtcattcggcctcaccctgtccttcgaggacttcaaggcgtggtcgtctaagtacggcgtggagttcaagacgaacgggtcccagacactcgctatcattaagaatgagaaggtgagcctgggccagtggcacaggagggggagggtctcgaaggctgtcctcgttaagatgctccggaagctgtacgatacaactaagtccgaggacgtgaagcgcatgctccatctgattgagggcctggaggtggtcaaggagatcaacgtcactaatgagccaaagaccttctacgacctgactgtggagcgctaccagaactacctcgccggggagaatggcatggttttcgtgcataatacgtccctgggccaagtgacaatcgatggcgggacctacgacatctataggacgacacgcgtcaaccagccttccattgtggggacagccacgttcgatcagtactggagcgtgcgcacctctaagcggacttcaggaacagtgaccgtgaccgatcacttccgcgcctgggcgaaccggggcctgaacctcggcacaatagaccaaattacattgtgcgtggagggttaccaaagctctggatcagccaacatcacccagaacaccttctctcagggctcttcttccggcagttcgggtggctcatccggctccacaacgactactcgcatcgagtgtgagaacatgtccttgtccggaccctacgttagcaggatcaccaatccctttaatggtattgcgctgtacgccaacggagacacagcccgcgctaccgttaacttccccgcaagtcgcaactacaatttccgcctgcggggttgcggcaacaacaataatcttgcccgtgtggacctgaggatcgacggacggaccgtcgggaccttttattaccagggcacatacccctgggaggccccaattgacaatgtttatgtcagtgcggggagtcatacagtcgaaatcactgttactgcggataacggcacatgggacgtgtatgccgactacctggtgatacagtgactcgagggggggcccggtacccaattcgccctatagtgagtcgtattacaattcactggccgtcgttttacaacgtcgtgactgggaaaaccctggcgttacccaacttaatcgccttgcagcacatccccctttcgccagctggcgtaatagcgaagaggcccgcaccgatcgcccttcccaacagttgcgcagcctgaatggcgaatggaaattgtaagcgttaatattttgttaaaattcgcgttaaatttttgttaaatcagctcattttttaaccaataggccgaaatcggcaaaatcccttataaatcaaaagaatagaccgagatagggttgagtgttgttccagtttggaacaagagtccactattaaagaacgtggactccaacgtcaaagggcgaaaaaccgtctatcagggcgatggcccactacgtgaaccatcaccctaatcaagttttttggggtcgaggtgccgtaaagcactaaatcggaaccctaaagggagcccccgatttagagcttgacggggaaagccggcgaacgtggcgagaaaggaagggaagaaagcgaaaggagcgggcgctagggcgctggcaagtgtagcggtcacgctgcgcgtaaccaccacacccgccgcgcttaatgcgccgctacagggcgcgtcaggtg

SEQ ID NO: 3306 - DNA, 5363 bp, Artificial Sequence
  Synthetic Construct, AT-149 intein modified protein encoding nucleic acids in pBluescript
gcacttttcggggaaatgtgcgcggaacccctatttgtttatttttctaaatacattcaaatatgtatccgctcatgagacaataaccctgataaatgcttcaataatattgaaaaaggaagagtatgagtattcaacatttccgtgtcgcccttattcccttttttgcggcattttgccttcctgtttttgctcacccagaaacgctggtgaaagtaaaagatgctgaagatcagttgggtgcacgagtgggttacatcgaactggatctcaacagcggtaagatccttgagagttttcgccccgaagaacgttttccaatgatgagcacttttaaagttctgctatgtggcgcggtattatcccgtattgacgccgggcaagagcaactcggtcgccgcatacactattctcagaatgacttggttgagtactcaccagtcacagaaaagcatcttacggatggcatgacagtaagagaattatgcagtgctgccataaccatgagtgataacactgcggccaacttacttctgacaacgatcggaggaccgaaggagctaaccgcttttttgcacaacatgggggatcatgtaactcgccttgatcgttgggaaccggagctgaatgaagccataccaaacgacgagcgtgacaccacgatgcctgtagcaatggcaacaacgttgcgcaaactattaactggcgaactacttactctagcttcccggcaacaattaatagactggatggaggcggataaagttgcaggaccacttctgcgctcggcccttccggctggctggtttattgctgataaatctggagccggtgagcgtgggtctcgcggtatcattgcagcactggggccagatggtaagccctcccgtatcgtagttatctacacgacggggagtcaggcaactatggatgaacgaaatagacagatcgctgagataggtgcctcactgattaagcattggtaactgtcagaccaagtttactcatatatactttagattgatttaaaacttcatttttaatttaaaaggatctaggtgaagatcctttttgataatctcatgaccaaaatcccttaacgtgagttttcgttccactgagcgtcagaccccgtagaaaagatcaaaggatcttcttgagatcctttttttctgcgcgtaatctgctgcttgcaaacaaaaaaaccaccgctaccagcggtggtttgtttgccggatcaagagctaccaactctttttccgaaggtaactggcttcagcagagcgcagataccaaatactgtccttctagtgtagccgtagttaggccaccacttcaagaactctgtagcaccgcctacatacctcgctctgctaatcctgttaccagtggctgctgccagtggcgataagtcgtgtcttaccgggttggactcaagacgatagttaccggataaggcgcagcggtcgggctgaacggggggttcgtgcacacagcccagcttggagcgaacgacctacaccgaactgagatacctacagcgtgagctatgagaaagcgccacgcttcccgaagggagaaaggcggacaggtatccggtaagcggcagggtcggaacaggagagcgcacgagggagcttccagggggaaacgcctggtatctttatagtcctgtcgggtttcgccacctctgacttgagcgtcgatttttgtgatgctcgtcaggggggcggagcctatggaaaaacgccagcaacgcggcctttttacggttcctggccttttgctggccttttgctcacatgttctttcctgcgttatcccctgattctgtggataaccgtattaccgcctttgagtgagctgataccgctcgccgcagccgaacgaccgagcgcagcgagtcagtgagcgaggaagcggaagagcgcccaatacgcaaaccgcctctccccgcgcgttggccgattcattaatgcagctggcacgacaggtttcccgactggaaagcgggcagtgagcgcaacgcaattaatgtgagttagctcactcattaggcaccccaggctttacactttatgcttccggctcgtatgttgtgtggaattgtgagcggataacaatttcacacaggaaacagcatatgcaaacaagcattactctgacatccaacgcatccggtacgtttgacggttactattacgaactctggaaggatactggcaatacaacaatgacggtctacactcaaggtcgcttttcctgccagtggtcgaacatcaataacgcgttgtttaggaccgggaagaaatacaaccagaattggcagtctcttggcacaatccggatcacgtactctgcgacttacaacccaaacgggaactcctacttgtgtatctatggctggtctaccaacccattggtcgagttctacatcgttgagtcctgggggaactggagaccgcctggtgcctgcctgcatccggactcactcattcctacgcctcagggggttaagcgcatcaaggagctgccggagaagggggaggtcttcgctctcgacttcgatctcaagctgtcacgggcgaggtacaggctcctggagagggacgctgatgagcccatgtacaaggtgacactctccgacaggactgagctctacctgaccgcggatcacccggtcctcgtttacagggacgatcagctgatcttcgtccccgctgaggagctccgggagaacgaccaggtggtcctgttcattaatcgctcagagtactccccaaggaccgagtcgcctacgctcctgggcttcctcctggagaacgccacctctatgaaggactacatcctctacgatccagagttcggcggggtgctgaggaatcgcattaaggacgcgggcctcaagactgagatcctgtggaggttccggattcgcgagcccacctactacaagtacctccgcggcaagatgccggttcccatcgtgaggttcctcctggaggagggcgttgtgagcattgaggagctccgggaggtgttccgcgggttctcgtactctacatcactgactccaatcagcttcgagttctcggaggagttctggtacctcttcggcctggtcgctggcgacgggcacctggctaagaagggggctatcaccattccagccaaggaccgcaccgaggatacggtcaaggcggttaaggagatcgctaactccctccaggtgcctttcgccttcgacgagaagtacaagatgatcattctgcggtccaagagcctcacgaggctgttcgagctcctgggctgcccgtacgggaacaagacagagatcttcaggattccgggcgagatcatggcgaagccagagtggatggctgcgttcctcgctggctactacgacgcggatggccacatcgggacaaagccaactggcgggaagaagtcgcattctcctcagatcgtcctgacgagcaagaaccgcatggccatctacacagtcaagcagatgtggcagctcctgggcgttgggacgtacctctgggagaagaaggacaggaacggcaatttcatggcctacgagctgaaggtgtactcccgcgacgcgtggcggttctacgaggtcatgaagaaccacctccgcatcaagaggaaggacctggagcatgtgaaggaggtcgctattaggaagcggaaggcctactctcaccattactcagttctcaatgtgaagtcttgggagggcaagatcaagtccagcaacgttctgtggaagaagttcgacatgtccaatcagaccgctcacggcagggggatcagcctcgacaagctgcagcgcattgtcgattacctcaccgacacggatctgcgcaggatcgcgatgggcgatgtctacgtgctggggatcaggtccattgagaagttccattaccggggcaaggtgtacgatctcgtcgtggatcagtaccacaacttcattgctaatggggtcgtcgttcataatacgtccctgggccaagtgacaatcgatggcgggacctacgacatctataggacgacacgcgtcaaccagccttccattgtggggacagccacgttcgatcagtactggagcgtgcgcacctctaagcggacttcaggaacagtgaccgtgaccgatcacttccgcgcctgggcgaaccggggcctgaacctcggcacaatagaccaaattacattgtgcgtggagggttaccaaagctctggatcagccaacatcacccagaacaccttctctcagggctcttcttccggcagttcgggtggctcatccggctccacaacgactactcgcatcgagtgtgagaacatgtccttgtccggaccctacgttagcaggatcaccaatccctttaatggtattgcgctgtacgccaacggagacacagcccgcgctaccgttaacttccccgcaagtcgcaactacaatttccgcctgcggggttgcggcaacaacaataatcttgcccgtgtggacctgaggatcgacggacggaccgtcgggaccttttattaccagggcacatacccctgggaggccccaattgacaatgtttatgtcagtgcggggagtcatacagtcgaaatcactgttactgcggataacggcacatgggacgtgtatgccgactacctggtgatacagtgactcgagggggggcccggtacccaattcgccctatagtgagtcgtattacaattcactggccgtcgttttacaacgtcgtgactgggaaaaccctggcgttacccaacttaatcgccttgcagcacatccccctttcgccagctggcgtaatagcgaagaggcccgcaccgatcgcccttcccaacagttgcgcagcctgaatggcgaatggaaattgtaagcgttaatattttgttaaaattcgcgttaaatttttgttaaatcagctcattttttaaccaataggccgaaatcggcaaaatcccttataaatcaaaagaatagaccgagatagggttgagtgttgttccagtttggaacaagagtccactattaaagaacgtggactccaacgtcaaagggcgaaaaaccgtctatcagggcgatggcccactacgtgaaccatcaccctaatcaagttttttggggtcgaggtgccgtaaagcactaaatcggaaccctaaagggagcccccgatttagagcttgacggggaaagccggcgaacgtggcgagaaaggaagggaagaaagcgaaaggagcgggcgctagggcgctggcaagtgtagcggtcacgctgcgcgtaaccaccacacccgccgcgcttaatgcgccgctacagggcgcgtcaggtg

SEQ ID NO: 3307 - DNA, 5099 bp, Artificial Sequence
  Synthetic Construct, AT-150 intein modified protein encoding nucleic acids in pBluescript
gcacttttcggggaaatgtgcgcggaacccctatttgtttatttttctaaatacattcaaatatgtatccgctcatgagacaataaccctgataaatgcttcaataatattgaaaaaggaagagtatgagtattcaacatttccgtgtcgcccttattcccttttttgcggcattttgccttcctgtttttgctcacccagaaacgctggtgaaagtaaaagatgctgaagatcagttgggtgcacgagtgggttacatcgaactggatctcaacagcggtaagatccttgagagttttcgccccgaagaacgttttccaatgatgagcacttttaaagttctgctatgtggcgcggtattatcccgtattgacgccgggcaagagcaactcggtcgccgcatacactattctcagaatgacttggttgagtactcaccagtcacagaaaagcatcttacggatggcatgacagtaagagaattatgcagtgctgccataaccatgagtgataacactgcggccaacttacttctgacaacgatcggaggaccgaaggagctaaccgcttttttgcacaacatgggggatcatgtaactcgccttgatcgttgggaaccggagctgaatgaagccataccaaacgacgagcgtgacaccacgatgcctgtagcaatggcaacaacgttgcgcaaactattaactggcgaactacttactctagcttcccggcaacaattaatagactggatggaggcggataaagttgcaggaccacttctgcgctcggcccttccggctggctggtttattgctgataaatctggagccggtgagcgtgggtctcgcggtatcattgcagcactggggccagatggtaagccctcccgtatcgtagttatctacacgacggggagtcaggcaactatggatgaacgaaatagacagatcgctgagataggtgcctcactgattaagcattggtaactgtcagaccaagtttactcatatatactttagattgatttaaaacttcatttttaatttaaaaggatctaggtgaagatcctttttgataatctcatgaccaaaatcccttaacgtgagttttcgttccactgagcgtcagaccccgtagaaaagatcaaaggatcttcttgagatcctttttttctgcgcgtaatctgctgcttgcaaacaaaaaaaccaccgctaccagcggtggtttgtttgccggatcaagagctaccaactctttttccgaaggtaactggcttcagcagagcgcagataccaaatactgtccttctagtgtagccgtagttaggccaccacttcaagaactctgtagcaccgcctacatacctcgctctgctaatcctgttaccagtggctgctgccagtggcgataagtcgtgtcttaccgggttggactcaagacgatagttaccggataaggcgcagcggtcgggctgaacggggggttcgtgcacacagcccagcttggagcgaacgacctacaccgaactgagatacctacagcgtgagctatgagaaagcgccacgcttcccgaagggagaaaggcggacaggtatccggtaagcggcagggtcggaacaggagagcgcacgagggagcttccagggggaaacgcctggtatctttatagtcctgtcgggtttcgccacctctgacttgagcgtcgatttttgtgatgctcgtcaggggggcggagcctatggaaaaacgccagcaacgcggcctttttacggttcctggccttttgctggccttttgctcacatgttctttcctgcgttatcccctgattctgtggataaccgtattaccgcctttgagtgagctgataccgctcgccgcagccgaacgaccgagcgcagcgagtcagtgagcgaggaagcggaagagcgcccaatacgcaaaccgcctctccccgcgcgttggccgattcattaatgcagctggcacgacaggtttcccgactggaaagcgggcagtgagcgcaacgcaattaatgtgagttagctcactcattaggcaccccaggctttacactttatgcttccggctcgtatgttgtgtggaattgtgagcggataacaatttcacacaggaaacagcatatgcaaacaagcattactctgacatccaacgcatccggtacgtttgacggttactattacgaactctggaaggatactggcaatacaacaatgacggtctacactcaaggtcgcttttcctgccagtggtcgaacatcaataacgcgttgtttaggaccgggaagaaatacaaccagaattggcagtctcttggcacaatccggatcacgtactctgcgacttacaacccaaacgggaactcctacttgtgtatctatggctggtctaccaacccattggtcgagttctacatcgttgagtcctgggggaactggagaccgcctggtgcctgcctgcctgcgcgggctagggtcgtggattggtgcacagggcgggtcgttcgggtcggggagatcgttaggggggaggctaagggcgtctgggtggtctccctggacgaggctaggctgaggctcgttccaaggcctgttgtggctgctttcccaagcggcaaggctcaggtgtacgctctgaggaccgctacgggcagggtgctggaggcgacagctaaccacccagtctacactccagagggctggaggccactggggaccctcgctcctggcgactacgtcgctctgccaaggcatctctcgtacaggccatctctgcacctggagggccatgagctggatctcctggggttcgctctggctgagggccacctccgccatccatcgggcgtgtacctctacacctccagcgaggaggagctggctgccatggaggaggctctcagggcgttccctaatacgcggatccgcgtcgtttggaggaggggggttgctcacgtctacgtgggcagggtggacaggaggcaggaggctggcgctgtggcgttcctcaggaggatgggcctcctggggctggatgcgaagacgaagaggctcccagaggctgtcttcggcctgccaccagaggaggttgctaggttcctggggaggctctggacaggcgacggcggggtggatccaaagggcaggctgattcactacgctactgctagcaaggagctcgcttggggcgtccagcatctcctgctcaggctgggcctccagagcaggctggtggagaagcggttctcgggcgggtacaagggctacgctgtctacctgctcggcgggctggaggctgctaggaggttcgctgagacagtggggccatacctggtcggcaagcggaggcaggacctggaggctctgctcgcttcatgggagaaggctggcaggtccaccggggatgttctgccactcgcgttcctggaggaggtgagggctgctgttgctgaggtggctcagggccaggtggctgacctgctcagggaggccggcctcgcggaggggctgctctgcctgggcagggggaggagggggctctctcgcgccaccgtcggcaggctggctgccctcacggggtcactggcgctgctccggctcgcggaggctgaggtttactgggatcgcgtcgaggcggttgagccgctcggcgaggaggaggtcttcgatctcactgtggagggcactcatactttcgttgcggaggatgttatcgttcataatacgtccctgggccaagtgacaatcgatggcgggacctacgacatctataggacgacacgcgtcaaccagccttccattgtggggacagccacgttcgatcagtactggagcgtgcgcacctctaagcggacttcaggaacagtgaccgtgaccgatcacttccgcgcctgggcgaaccggggcctgaacctcggcacaatagaccaaattacattgtgcgtggagggttaccaaagctctggatcagccaacatcacccagaacaccttctctcagggctcttcttccggcagttcgggtggctcatccggctccacaacgactactcgcatcgagtgtgagaacatgtccttgtccggaccctacgttagcaggatcaccaatccctttaatggtattgcgctgtacgccaacggagacacagcccgcgctaccgttaacttccccgcaagtcgcaactacaatttccgcctgcggggttgcggcaacaacaataatcttgcccgtgtggacctgaggatcgacggacggaccgtcgggaccttttattaccagggcacatacccctgggaggccccaattgacaatgtttatgtcagtgcggggagtcatacagtcgaaatcactgttactgcggataacggcacatgggacgtgtatgccgactacctggtgatacagtgactcgagggggggcccggtacccaattcgccctatagtgagtcgtattacaattcactggccgtcgttttacaacgtcgtgactgggaaaaccctggcgttacccaacttaatcgccttgcagcacatccccctttcgccagctggcgtaatagcgaagaggcccgcaccgatcgcccttcccaacagttgcgcagcctgaatggcgaatggaaattgtaagcgttaatattttgttaaaattcgcgttaaatttttgttaaatcagctcattttttaaccaataggccgaaatcggcaaaatcccttataaatcaaaagaatagaccgagatagggttgagtgttgttccagtttggaacaagagtccactattaaagaacgtggactccaacgtcaaagggcgaaaaaccgtctatcagggcgatggcccactacgtgaaccatcaccctaatcaagttttttggggtcgaggtgccgtaaagcactaaatcggaaccctaaagggagcccccgatttagagcttgacggggaaagccggcgaacgtggcgagaaaggaagggaagaaagcgaaaggagcgggcgctagggcgctggcaagtgtagcggtcacgctgcgcgtaaccaccacacccgccgcgcttaatgcgccgctacagggcgcgtcaggtg

SEQ ID NO: 3308 - DNA, 5144 bp, Artificial Sequence
  Synthetic Construct, AT-151 intein modified protein encoding nucleic acids in pBluescript
gcacttttcggggaaatgtgcgcggaacccctatttgtttatttttctaaatacattcaaatatgtatccgctcatgagacaataaccctgataaatgcttcaataatattgaaaaaggaagagtatgagtattcaacatttccgtgtcgcccttattcccttttttgcggcattttgccttcctgtttttgctcacccagaaacgctggtgaaagtaaaagatgctgaagatcagttgggtgcacgagtgggttacatcgaactggatctcaacagcggtaagatccttgagagttttcgccccgaagaacgttttccaatgatgagcacttttaaagttctgctatgtggcgcggtattatcccgtattgacgccgggcaagagcaactcggtcgccgcatacactattctcagaatgacttggttgagtactcaccagtcacagaaaagcatcttacggatggcatgacagtaagagaattatgcagtgctgccataaccatgagtgataacactgcggccaacttacttctgacaacgatcggaggaccgaaggagctaaccgcttttttgcacaacatgggggatcatgtaactcgccttgatcgttgggaaccggagctgaatgaagccataccaaacgacgagcgtgacaccacgatgcctgtagcaatggcaacaacgttgcgcaaactattaactggcgaactacttactctagcttcccggcaacaattaatagactggatggaggcggataaagttgcaggaccacttctgcgctcggcccttccggctggctggtttattgctgataaatctggagccggtgagcgtgggtctcgcggtatcattgcagcactggggccagatggtaagccctcccgtatcgtagttatctacacgacggggagtcaggcaactatggatgaacgaaatagacagatcgctgagataggtgcctcactgattaagcattggtaactgtcagaccaagtttactcatatatactttagattgatttaaaacttcatttttaatttaaaaggatctaggtgaagatcctttttgataatctcatgaccaaaatcccttaacgtgagttttcgttccactgagcgtcagaccccgtagaaaagatcaaaggatcttcttgagatcctttttttctgcgcgtaatctgctgcttgcaaacaaaaaaaccaccgctaccagcggtggtttgtttgccggatcaagagctaccaactctttttccgaaggtaactggcttcagcagagcgcagataccaaatactgtccttctagtgtagccgtagttaggccaccacttcaagaactctgtagcaccgcctacatacctcgctctgctaatcctgttaccagtggctgctgccagtggcgataagtcgtgtcttaccgggttggactcaagacgatagttaccggataaggcgcagcggtcgggctgaacggggggttcgtgcacacagcccagcttggagcgaacgacctacaccgaactgagatacctacagcgtgagctatgagaaagcgccacgcttcccgaagggagaaaggcggacaggtatccggtaagcggcagggtcggaacaggagagcgcacgagggagcttccagggggaaacgcctggtatctttatagtcctgtcgggtttcgccacctctgacttgagcgtcgatttttgtgatgctcgtcaggggggcggagcctatggaaaaacgccagcaacgcggcctttttacggttcctggccttttgctggccttttgctcacatgttctttcctgcgttatcccctgattctgtggataaccgtattaccgcctttgagtgagctgataccgctcgccgcagccgaacgaccgagcgcagcgagtcagtgagcgaggaagcggaagagcgcccaatacgcaaaccgcctctccccgcgcgttggccgattcattaatgcagctggcacgacaggtttcccgactggaaagcgggcagtgagcgcaacgcaattaatgtgagttagctcactcattaggcaccccaggctttacactttatgcttccggctcgtatgttgtgtggaattgtgagcggataacaatttcacacaggaaacagcatatgcaaacaagcattactctgacatccaacgcatccggtacgtttgacggttactattacgaactctggaaggatactggcaatacaacaatgacggtctacactcaaggtcgcttttcctgccagtggtcgaacatcaataacgcgttgtttaggaccgggaagaaatacaaccagaattggcagtctcttggcacaatccggatcacgtactctgcgacttacaacccaaacgggaactcctacttgtgtatctatggctggtctaccaacccattggtcgagttctacatcgttgagtcctgggggaactggagaccgcctggtgcctgcctgcatccggacactctcgttcataccgatcgggggactctcaggctgcgggagctcgtggaccctttcaggcggggctggcagccgcacaccctgagcgttgctacggacgagggctggaggccatcgccagagggctacaacaatggggtggctccaaccctcagggtggtcctggagaacggcctggaggttcaggggacactcaatcataagctcaaggtgctgcgcgaggatggcactagggagtgggtcgagctccaggacctgaggccaggcgattgggtcatctgggttctggacgagcacaccggcacgccagtccagctcgctccactggatgagccactccatcctaacaccacgccaattcgcacacctgaggtgctgactgaggacctcgccttcctcctgggcttcttcttcggcgaggggttcgtgtcgggcgataggatcgggttctctgtccacgaggaggagccaatgcgggaggaggcgaagaggctgttccgggagctcttcggcctggagctgagggaggagaggaagccaggggaccgctcagttaccctggttgtgcggtcccgccctctggtgacgtggctccgcaagaacggcctcctgaaggggaaggcgagggagctggaggtcccgcgggctatcaggcagtccccaaggcctgttctcgctgcgttcctcaggggcctgttcgaggccgacggcacaattactgcggggtacccaatgctgacaactgcgagcaagcgcctcgctcaggatgtgatggtcctcctgggcgggctgggcattccttctaagctcctgaggtacaatccactcccaggccgcttctcaaaggctgagcattacggcgtccgggtcgttacggctaaggggctggagaggtacctggagcggatcggcgtgccaaaggggtcgcgcctggaggcgctgcacggcattaagccagacgtccgcagggagtccagctggccactgcctcatgctgagggcctcctgaagccactcctgaccgtgacggagaagggcaggaaggggtacgctagcccatacacaccactgcgcaaggacctcctgaggtacctgaggggcgagaggcagctcacagctactgggtacgccatggtcctggagaaggctcaggatctcggcctggaggctgagccattccccttcaacgagtactacgttagggtggcctccgtggagccgggcggggagatcctcacgctggatctctctgtggagggcaatcatacatacctcgccaatgggctcgtctctcataatacgtccctgggccaagtgacaatcgatggcgggacctacgacatctataggacgacacgcgtcaaccagccttccattgtggggacagccacgttcgatcagtactggagcgtgcgcacctctaagcggacttcaggaacagtgaccgtgaccgatcacttccgcgcctgggcgaaccggggcctgaacctcggcacaatagaccaaattacattgtgcgtggagggttaccaaagctctggatcagccaacatcacccagaacaccttctctcagggctcttcttccggcagttcgggtggctcatccggctccacaacgactactcgcatcgagtgtgagaacatgtccttgtccggaccctacgttagcaggatcaccaatccctttaatggtattgcgctgtacgccaacggagacacagcccgcgctaccgttaacttccccgcaagtcgcaactacaatttccgcctgcggggttgcggcaacaacaataatcttgcccgtgtggacctgaggatcgacggacggaccgtcgggaccttttattaccagggcacatacccctgggaggccccaattgacaatgtttatgtcagtgcggggagtcatacagtcgaaatcactgttactgcggataacggcacatgggacgtgtatgccgactacctggtgatacagtgactcgagggggggcccggtacccaattcgccctatagtgagtcgtattacaattcactggccgtcgttttacaacgtcgtgactgggaaaaccctggcgttacccaacttaatcgccttgcagcacatccccctttcgccagctggcgtaatagcgaagaggcccgcaccgatcgcccttcccaacagttgcgcagcctgaatggcgaatggaaattgtaagcgttaatattttgttaaaattcgcgttaaatttttgttaaatcagctcattttttaaccaataggccgaaatcggcaaaatcccttataaatcaaaagaatagaccgagatagggttgagtgttgttccagtttggaacaagagtccactattaaagaacgtggactccaacgtcaaagggcgaaaaaccgtctatcagggcgatggcccactacgtgaaccatcaccctaatcaagttttttggggtcgaggtgccgtaaagcactaaatcggaaccctaaagggagcccccgatttagagcttgacggggaaagccggcgaacgtggcgagaaaggaagggaagaaagcgaaaggagcgggcgctagggcgctggcaagtgtagcggtcacgctgcgcgtaaccaccacacccgccgcgcttaatgcgccgctacagggcgcgtcaggtg

SEQ ID NO: 3309 - DNA, 5051 bp, Artificial Sequence
  Synthetic Construct, AT-152 intein modified protein encoding nucleic acids in pBluescript
gcacttttcggggaaatgtgcgcggaacccctatttgtttatttttctaaatacattcaaatatgtatccgctcatgagacaataaccctgataaatgcttcaataatattgaaaaaggaagagtatgagtattcaacatttccgtgtcgcccttattcccttttttgcggcattttgccttcctgtttttgctcacccagaaacgctggtgaaagtaaaagatgctgaagatcagttgggtgcacgagtgggttacatcgaactggatctcaacagcggtaagatccttgagagttttcgccccgaagaacgttttccaatgatgagcacttttaaagttctgctatgtggcgcggtattatcccgtattgacgccgggcaagagcaactcggtcgccgcatacactattctcagaatgacttggttgagtactcaccagtcacagaaaagcatcttacggatggcatgacagtaagagaattatgcagtgctgccataaccatgagtgataacactgcggccaacttacttctgacaacgatcggaggaccgaaggagctaaccgcttttttgcacaacatgggggatcatgtaactcgccttgatcgttgggaaccggagctgaatgaagccataccaaacgacgagcgtgacaccacgatgcctgtagcaatggcaacaacgttgcgcaaactattaactggcgaactacttactctagcttcccggcaacaattaatagactggatggaggcggataaagttgcaggaccacttctgcgctcggcccttccggctggctggtttattgctgataaatctggagccggtgagcgtgggtctcgcggtatcattgcagcactggggccagatggtaagccctcccgtatcgtagttatctacacgacggggagtcaggcaactatggatgaacgaaatagacagatcgctgagataggtgcctcactgattaagcattggtaactgtcagaccaagtttactcatatatactttagattgatttaaaacttcatttttaatttaaaaggatctaggtgaagatcctttttgataatctcatgaccaaaatcccttaacgtgagttttcgttccactgagcgtcagaccccgtagaaaagatcaaaggatcttcttgagatcctttttttctgcgcgtaatctgctgcttgcaaacaaaaaaaccaccgctaccagcggtggtttgtttgccggatcaagagctaccaactctttttccgaaggtaactggcttcagcagagcgcagataccaaatactgtccttctagtgtagccgtagttaggccaccacttcaagaactctgtagcaccgcctacatacctcgctctgctaatcctgttaccagtggctgctgccagtggcgataagtcgtgtcttaccgggttggactcaagacgatagttaccggataaggcgcagcggtcgggctgaacggggggttcgtgcacacagcccagcttggagcgaacgacctacaccgaactgagatacctacagcgtgagctatgagaaagcgccacgcttcccgaagggagaaaggcggacaggtatccggtaagcggcagggtcggaacaggagagcgcacgagggagcttccagggggaaacgcctggtatctttatagtcctgtcgggtttcgccacctctgacttgagcgtcgatttttgtgatgctcgtcaggggggcggagcctatggaaaaacgccagcaacgcggcctttttacggttcctggccttttgctggccttttgctcacatgttctttcctgcgttatcccctgattctgtggataaccgtattaccgcctttgagtgagctgataccgctcgccgcagccgaacgaccgagcgcagcgagtcagtgagcgaggaagcggaagagcgcccaatacgcaaaccgcctctccccgcgcgttggccgattcattaatgcagctggcacgacaggtttcccgactggaaagcgggcagtgagcgcaacgcaattaatgtgagttagctcactcattaggcaccccaggctttacactttatgcttccggctcgtatgttgtgtggaattgtgagcggataacaatttcacacaggaaacagcatatgcaaacaagcattactctgacatccaacgcatccggtacgtttgacggttactattacgaactctggaaggatactggcaatacaacaatgacggtctacactcaaggtcgcttttcctgccagtggtcgaacatcaataacgcgttgtttaggaccgggaagaaatacaaccagaattggcagtctcttggcacaatccggatcacgtactctgcgacttacaacccaaacgggaactcctacttgtgtatctatggctggtctaccaacccattggtcgagttctacatcgttgagtcctgggggaactggagaccgcctggtgcctgcttcgtggggtctactcgcattccgacggagcgggggctggttcctattgaggagctcgctagggagggggggtctttctacctggtgactgacaacagggctccgttcggcgggaggggcgctccactcccaggccacgggaccgccgtcaggaaggccgttcgggcgttcttcacgggcgtcaagccagtggtccggctgaggacaagggagggcctggaggttaccctcacgccagatcatctcctgctcacgccagagggctacagggaggctgggaagctgaggccaggcgagaagatcctcgtccagtccggcgaggggctgttcccaaaggaggagagcctgcctgctcaggctctcgctgttgtgcacgagagggtggcgacggctggcgggaggggcgggaggggcagggctgacgtccgcgcccagtacaggaacctccccacacgctggtcaagggagctgggcgttgctctcgggtggctgctcggcgacgggtacctgagggaggatggcgtcgggttctacttctcccggaaggacttcgctgatctggcctggctcccagacctgctccgcgattggttcggccctgggacactccaggagactcgcagcaacaccttccacctgcatttcaataggatcccggctgagttcttccaggctctcggcgtgaaggctgcgcgggcaactgagaagagggtcccagagtcgctgttccgggctcctcgcgaggctgtcgttggcttcctgcaggggctcttctctgcggacggctcagttcagattaacgagaataagcaggatgctaccgtgaggctggcctccagctcgctcgctctgctccaggacgtgcagctgctcctgctcaacctgggcatcctcgggaagattcacaagaggagggaggctgctaggaaggctctcccggacggcaagggcgggctgagggagtacccagtcgctcctcagtacgagctgattctcggcggggagaatagggatcggttcgccgaggtggtcggcttcctccaggaggagaagcagagcaagctgctcgcgttcctgaggcataggccgaggggctcgtacaggaagcccttcctcgctaccgttgcttctgtggagccagctggcgaggcgcccgtgtacgatctcacagagccagttacacactcgctcattgctaatgggctcgttgctcataatacgtccctgggccaagtgacaatcgatggcgggacctacgacatctataggacgacacgcgtcaaccagccttccattgtggggacagccacgttcgatcagtactggagcgtgcgcacctctaagcggacttcaggaacagtgaccgtgaccgatcacttccgcgcctgggcgaaccggggcctgaacctcggcacaatagaccaaattacattgtgcgtggagggttaccaaagctctggatcagccaacatcacccagaacaccttctctcagggctcttcttccggcagttcgggtggctcatccggctccacaacgactactcgcatcgagtgtgagaacatgtccttgtccggaccctacgttagcaggatcaccaatccctttaatggtattgcgctgtacgccaacggagacacagcccgcgctaccgttaacttccccgcaagtcgcaactacaatttccgcctgcggggttgcggcaacaacaataatcttgcccgtgtggacctgaggatcgacggacggaccgtcgggaccttttattaccagggcacatacccctgggaggccccaattgacaatgtttatgtcagtgcggggagtcatacagtcgaaatcactgttactgcggataacggcacatgggacgtgtatgccgactacctggtgatacagtgactcgagggggggcccggtacccaattcgccctatagtgagtcgtattacaattcactggccgtcgttttacaacgtcgtgactgggaaaaccctggcgttacccaacttaatcgccttgcagcacatccccctttcgccagctggcgtaatagcgaagaggcccgcaccgatcgcccttcccaacagttgcgcagcctgaatggcgaatggaaattgtaagcgttaatattttgttaaaattcgcgttaaatttttgttaaatcagctcattttttaaccaataggccgaaatcggcaaaatcccttataaatcaaaagaatagaccgagatagggttgagtgttgttccagtttggaacaagagtccactattaaagaacgtggactccaacgtcaaagggcgaaaaaccgtctatcagggcgatggcccactacgtgaaccatcaccctaatcaagttttttggggtcgaggtgccgtaaagcactaaatcggaaccctaaagggagcccccgatttagagcttgacggggaaagccggcgaacgtggcgagaaaggaagggaagaaagcgaaaggagcgggcgctagggcgctggcaagtgtagcggtcacgctgcgcgtaaccaccacacccgccgcgcttaatgcgccgctacagggcgcgtcaggtg

SEQ ID NO: 3310 - DNA, 4388 bp, Artificial Sequence
  Synthetic Construct, AT-153 intein modified protein encoding nucleic acids in pBluescript
gcacttttcggggaaatgtgcgcggaacccctatttgtttatttttctaaatacattcaaatatgtatccgctcatgagacaataaccctgataaatgcttcaataatattgaaaaaggaagagtatgagtattcaacatttccgtgtcgcccttattcccttttttgcggcattttgccttcctgtttttgctcacccagaaacgctggtgaaagtaaaagatgctgaagatcagttgggtgcacgagtgggttacatcgaactggatctcaacagcggtaagatccttgagagttttcgccccgaagaacgttttccaatgatgagcacttttaaagttctgctatgtggcgcggtattatcccgtattgacgccgggcaagagcaactcggtcgccgcatacactattctcagaatgacttggttgagtactcaccagtcacagaaaagcatcttacggatggcatgacagtaagagaattatgcagtgctgccataaccatgagtgataacactgcggccaacttacttctgacaacgatcggaggaccgaaggagctaaccgcttttttgcacaacatgggggatcatgtaactcgccttgatcgttgggaaccggagctgaatgaagccataccaaacgacgagcgtgacaccacgatgcctgtagcaatggcaacaacgttgcgcaaactattaactggcgaactacttactctagcttcccggcaacaattaatagactggatggaggcggataaagttgcaggaccacttctgcgctcggcccttccggctggctggtttattgctgataaatctggagccggtgagcgtgggtctcgcggtatcattgcagcactggggccagatggtaagccctcccgtatcgtagttatctacacgacggggagtcaggcaactatggatgaacgaaatagacagatcgctgagataggtgcctcactgattaagcattggtaactgtcagaccaagtttactcatatatactttagattgatttaaaacttcatttttaatttaaaaggatctaggtgaagatcctttttgataatctcatgaccaaaatcccttaacgtgagttttcgttccactgagcgtcagaccccgtagaaaagatcaaaggatcttcttgagatcctttttttctgcgcgtaatctgctgcttgcaaacaaaaaaaccaccgctaccagcggtggtttgtttgccggatcaagagctaccaactctttttccgaaggtaactggcttcagcagagcgcagataccaaatactgtccttctagtgtagccgtagttaggccaccacttcaagaactctgtagcaccgcctacatacctcgctctgctaatcctgttaccagtggctgctgccagtggcgataagtcgtgtcttaccgggttggactcaagacgatagttaccggataaggcgcagcggtcgggctgaacggggggttcgtgcacacagcccagcttggagcgaacgacctacaccgaactgagatacctacagcgtgagctatgagaaagcgccacgcttcccgaagggagaaaggcggacaggtatccggtaagcggcagggtcggaacaggagagcgcacgagggagcttccagggggaaacgcctggtatctttatagtcctgtcgggtttcgccacctctgacttgagcgtcgatttttgtgatgctcgtcaggggggcggagcctatggaaaaacgccagcaacgcggcctttttacggttcctggccttttgctggccttttgctcacatgttctttcctgcgttatcccctgattctgtggataaccgtattaccgcctttgagtgagctgataccgctcgccgcagccgaacgaccgagcgcagcgagtcagtgagcgaggaagcggaagagcgcccaatacgcaaaccgcctctccccgcgcgttggccgattcattaatgcagctggcacgacaggtttcccgactggaaagcgggcagtgagcgcaacgcaattaatgtgagttagctcactcattaggcaccccaggctttacactttatgcttccggctcgtatgttgtgtggaattgtgagcggataacaatttcacacaggaaacagcatatgcaaacaagcattactctgacatccaacgcatccggtacgtttgacggttactattacgaactctggaaggatactggcaatacaacaatgacggtctacactcaaggtcgcttttcctgccagtggtcgaacatcaataacgcgttgtttaggaccgggaagaaatacaaccagaattggcagtctcttggcacaatccggatcacgtactctgcgacttacaacccaaacgggaactcctacttgtgtatctatggctggtctaccaacccattggtcgagttctacatcgttgagtcctgggggaactggagaccgcctggtgcctgcgtttcgggggagacgccagtctacctcgctgacggcaagacaattaagatcaaggacctctactcatctgagcgcaagaaggaggacaacatcgtcgaggctggctccggggaggagatcattcacctcaaggacccgatccagatctacagctacgttgatggcacgatcgtgcgctcccgctcccgcctcctgtacaaggggaagtccagctacctggtgcgcatcgagacaattggcgggcgctcagtgtccgtcactcccgtccataagctcttcgttctgaccgagaagggcatcgaggaggttatggcctcgaatctcaaagtgggggacatgattgctgctgtcgctgagagcgagtcggaggcccgggattgcggcatgagcgaggagtgcgtgatggaggcggaggtctacacctctctggaggctacgttcgaccgcgttaagtcaatcgcgtacgagaagggcgacttcgatgtgtacgatctgtcagttccagagtacggcaggaacttcattgggggggaggggctgctcgtgctccacaacacgtccctgggccaagtgacaatcgatggcgggacctacgacatctataggacgacacgcgtcaaccagccttccattgtggggacagccacgttcgatcagtactggagcgtgcgcacctctaagcggacttcaggaacagtgaccgtgaccgatcacttccgcgcctgggcgaaccggggcctgaacctcggcacaatagaccaaattacattgtgcgtggagggttaccaaagctctggatcagccaacatcacccagaacaccttctctcagggctcttcttccggcagttcgggtggctcatccggctccacaacgactactcgcatcgagtgtgagaacatgtccttgtccggaccctacgttagcaggatcaccaatccctttaatggtattgcgctgtacgccaacggagacacagcccgcgctaccgttaacttccccgcaagtcgcaactacaatttccgcctgcggggttgcggcaacaacaataatcttgcccgtgtggacctgaggatcgacggacggaccgtcgggaccttttattaccagggcacatacccctgggaggccccaattgacaatgtttatgtcagtgcggggagtcatacagtcgaaatcactgttactgcggataacggcacatgggacgtgtatgccgactacctggtgatacagtgactcgagggggggcccggtacccaattcgccctatagtgagtcgtattacaattcactggccgtcgttttacaacgtcgtgactgggaaaaccctggcgttacccaacttaatcgccttgcagcacatccccctttcgccagctggcgtaatagcgaagaggcccgcaccgatcgcccttcccaacagttgcgcagcctgaatggcgaatggaaattgtaagcgttaatattttgttaaaattcgcgttaaatttttgttaaatcagctcattttttaaccaataggccgaaatcggcaaaatcccttataaatcaaaagaatagaccgagatagggttgagtgttgttccagtttggaacaagagtccactattaaagaacgtggactccaacgtcaaagggcgaaaaaccgtctatcagggcgatggcccactacgtgaaccatcaccctaatcaagttttttggggtcgaggtgccgtaaagcactaaatcggaaccctaaagggagcccccgatttagagcttgacggggaaagccggcgaacgtggcgagaaaggaagggaagaaagcgaaaggagcgggcgctagggcgctggcaagtgtagcggtcacgctgcgcgtaaccaccacacccgccgcgcttaatgcgccgctacagggcgcgtcaggtg

SEQ ID NO: 3311 - DNA, 4286 bp, Artificial Sequence
  Synthetic Construct, AT-154 intein modified protein encoding nucleic acids in pBluescript
gcacttttcggggaaatgtgcgcggaacccctatttgtttatttttctaaatacattcaaatatgtatccgctcatgagacaataaccctgataaatgcttcaataatattgaaaaaggaagagtatgagtattcaacatttccgtgtcgcccttattcccttttttgcggcattttgccttcctgtttttgctcacccagaaacgctggtgaaagtaaaagatgctgaagatcagttgggtgcacgagtgggttacatcgaactggatctcaacagcggtaagatccttgagagttttcgccccgaagaacgttttccaatgatgagcacttttaaagttctgctatgtggcgcggtattatcccgtattgacgccgggcaagagcaactcggtcgccgcatacactattctcagaatgacttggttgagtactcaccagtcacagaaaagcatcttacggatggcatgacagtaagagaattatgcagtgctgccataaccatgagtgataacactgcggccaacttacttctgacaacgatcggaggaccgaaggagctaaccgcttttttgcacaacatgggggatcatgtaactcgccttgatcgttgggaaccggagctgaatgaagccataccaaacgacgagcgtgacaccacgatgcctgtagcaatggcaacaacgttgcgcaaactattaactggcgaactacttactctagcttcccggcaacaattaatagactggatggaggcggataaagttgcaggaccacttctgcgctcggcccttccggctggctggtttattgctgataaatctggagccggtgagcgtgggtctcgcggtatcattgcagcactggggccagatggtaagccctcccgtatcgtagttatctacacgacggggagtcaggcaactatggatgaacgaaatagacagatcgctgagataggtgcctcactgattaagcattggtaactgtcagaccaagtttactcatatatactttagattgatttaaaacttcatttttaatttaaaaggatctaggtgaagatcctttttgataatctcatgaccaaaatcccttaacgtgagttttcgttccactgagcgtcagaccccgtagaaaagatcaaaggatcttcttgagatcctttttttctgcgcgtaatctgctgcttgcaaacaaaaaaaccaccgctaccagcggtggtttgtttgccggatcaagagctaccaactctttttccgaaggtaactggcttcagcagagcgcagataccaaatactgtccttctagtgtagccgtagttaggccaccacttcaagaactctgtagcaccgcctacatacctcgctctgctaatcctgttaccagtggctgctgccagtggcgataagtcgtgtcttaccgggttggactcaagacgatagttaccggataaggcgcagcggtcgggctgaacggggggttcgtgcacacagcccagcttggagcgaacgacctacaccgaactgagatacctacagcgtgagctatgagaaagcgccacgcttcccgaagggagaaaggcggacaggtatccggtaagcggcagggtcggaacaggagagcgcacgagggagcttccagggggaaacgcctggtatctttatagtcctgtcgggtttcgccacctctgacttgagcgtcgatttttgtgatgctcgtcaggggggcggagcctatggaaaaacgccagcaacgcggcctttttacggttcctggccttttgctggccttttgctcacatgttctttcctgcgttatcccctgattctgtggataaccgtattaccgcctttgagtgagctgataccgctcgccgcagccgaacgaccgagcgcagcgagtcagtgagcgaggaagcggaagagcgcccaatacgcaaaccgcctctccccgcgcgttggccgattcattaatgcagctggcacgacaggtttcccgactggaaagcgggcagtgagcgcaacgcaattaatgtgagttagctcactcattaggcaccccaggctttacactttatgcttccggctcgtatgttgtgtggaattgtgagcggataacaatttcacacaggaaacagcatatgcaaacaagcattactctgacatccaacgcatccggtacgtttgacggttactattacgaactctggaaggatactggcaatacaacaatgacggtctacactcaaggtcgcttttcctgccagtggtcgaacatcaataacgcgttgtttaggaccgggaagaaatacaaccagaattggcagtctcttggcacaatccggatcacgtactctgcgacttacaacccaaacgggaactcctacttgtgtatctatggctggtctaccaacccattggtcgagttctacatcgttgagtcctgggggaactggagaccgcctggtgcctgcctctcaggggagactgcggttatgacggtggagtacggggctattcctattcggcggctggttcaggagcggctgatctgccaggtttactcgctcgacccacagggccacctgtacacgcagcctatcgctcagtggcatttccagggcttccgcccggtgtacgcgtaccagctggaggacgggtccacaatttgcgctactccggatcaccggttcatgaccacgagcggccagatgctgcccatcgagcagattttccgcgaggggctggagctgtggcaggtggccatcgctccaccaggcgctctcgctcaggggctgaagccggccgtccagatgtcctgcatgaagattgtgggcaggaggctcgtcgggtggcaggctgtttacgatattgggctcgccggggatcataacttcctcctcgctaatggggctattgctgctaatacgtccctgggccaagtgacaatcgatggcgggacctacgacatctataggacgacacgcgtcaaccagccttccattgtggggacagccacgttcgatcagtactggagcgtgcgcacctctaagcggacttcaggaacagtgaccgtgaccgatcacttccgcgcctgggcgaaccggggcctgaacctcggcacaatagaccaaattacattgtgcgtggagggttaccaaagctctggatcagccaacatcacccagaacaccttctctcagggctcttcttccggcagttcgggtggctcatccggctccacaacgactactcgcatcgagtgtgagaacatgtccttgtccggaccctacgttagcaggatcaccaatccctttaatggtattgcgctgtacgccaacggagacacagcccgcgctaccgttaacttccccgcaagtcgcaactacaatttccgcctgcggggttgcggcaacaacaataatcttgcccgtgtggacctgaggatcgacggacggaccgtcgggaccttttattaccagggcacatacccctgggaggccccaattgacaatgtttatgtcagtgcggggagtcatacagtcgaaatcactgttactgcggataacggcacatgggacgtgtatgccgactacctggtgatacagtgactcgagggggggcccggtacccaattcgccctatagtgagtcgtattacaattcactggccgtcgttttacaacgtcgtgactgggaaaaccctggcgttacccaacttaatcgccttgcagcacatccccctttcgccagctggcgtaatagcgaagaggcccgcaccgatcgcccttcccaacagttgcgcagcctgaatggcgaatggaaattgtaagcgttaatattttgttaaaattcgcgttaaatttttgttaaatcagctcattttttaaccaataggccgaaatcggcaaaatcccttataaatcaaaagaatagaccgagatagggttgagtgttgttccagtttggaacaagagtccactattaaagaacgtggactccaacgtcaaagggcgaaaaaccgtctatcagggcgatggcccactacgtgaaccatcaccctaatcaagttttttggggtcgaggtgccgtaaagcactaaatcggaaccctaaagggagcccccgatttagagcttgacggggaaagccggcgaacgtggcgagaaaggaagggaagaaagcgaaaggagcgggcgctagggcgctggcaagtgtagcggtcacgctgcgcgtaaccaccacacccgccgcgcttaatgcgccgctacagggcgcgtcaggtg

SEQ ID NO: 3312 - DNA, 4751 bp, Artificial Sequence
  Synthetic Construct, AT-155 intein modified protein encoding nucleic acids in pBluescript
gcacttttcggggaaatgtgcgcggaacccctatttgtttatttttctaaatacattcaaatatgtatccgctcatgagacaataaccctgataaatgcttcaataatattgaaaaaggaagagtatgagtattcaacatttccgtgtcgcccttattcccttttttgcggcattttgccttcctgtttttgctcacccagaaacgctggtgaaagtaaaagatgctgaagatcagttgggtgcacgagtgggttacatcgaactggatctcaacagcggtaagatccttgagagttttcgccccgaagaacgttttccaatgatgagcacttttaaagttctgctatgtggcgcggtattatcccgtattgacgccgggcaagagcaactcggtcgccgcatacactattctcagaatgacttggttgagtactcaccagtcacagaaaagcatcttacggatggcatgacagtaagagaattatgcagtgctgccataaccatgagtgataacactgcggccaacttacttctgacaacgatcggaggaccgaaggagctaaccgcttttttgcacaacatgggggatcatgtaactcgccttgatcgttgggaaccggagctgaatgaagccataccaaacgacgagcgtgacaccacgatgcctgtagcaatggcaacaacgttgcgcaaactattaactggcgaactacttactctagcttcccggcaacaattaatagactggatggaggcggataaagttgcaggaccacttctgcgctcggcccttccggctggctggtttattgctgataaatctggagccggtgagcgtgggtctcgcggtatcattgcagcactggggccagatggtaagccctcccgtatcgtagttatctacacgacggggagtcaggcaactatggatgaacgaaatagacagatcgctgagataggtgcctcactgattaagcattggtaactgtcagaccaagtttactcatatatactttagattgatttaaaacttcatttttaatttaaaaggatctaggtgaagatcctttttgataatctcatgaccaaaatcccttaacgtgagttttcgttccactgagcgtcagaccccgtagaaaagatcaaaggatcttcttgagatcctttttttctgcgcgtaatctgctgcttgcaaacaaaaaaaccaccgctaccagcggtggtttgtttgccggatcaagagctaccaactctttttccgaaggtaactggcttcagcagagcgcagataccaaatactgtccttctagtgtagccgtagttaggccaccacttcaagaactctgtagcaccgcctacatacctcgctctgctaatcctgttaccagtggctgctgccagtggcgataagtcgtgtcttaccgggttggactcaagacgatagttaccggataaggcgcagcggtcgggctgaacggggggttcgtgcacacagcccagcttggagcgaacgacctacaccgaactgagatacctacagcgtgagctatgagaaagcgccacgcttcccgaagggagaaaggcggacaggtatccggtaagcggcagggtcggaacaggagagcgcacgagggagcttccagggggaaacgcctggtatctttatagtcctgtcgggtttcgccacctctgacttgagcgtcgatttttgtgatgctcgtcaggggggcggagcctatggaaaaacgccagcaacgcggcctttttacggttcctggccttttgctggccttttgctcacatgttctttcctgcgttatcccctgattctgtggataaccgtattaccgcctttgagtgagctgataccgctcgccgcagccgaacgaccgagcgcagcgagtcagtgagcgaggaagcggaagagcgcccaatacgcaaaccgcctctccccgcgcgttggccgattcattaatgcagctggcacgacaggtttcccgactggaaagcgggcagtgagcgcaacgcaattaatgtgagttagctcactcattaggcaccccaggctttacactttatgcttccggctcgtatgttgtgtggaattgtgagcggataacaatttcacacaggaaacagcatatgcaaacaagcattactctgacatccaacgcatccggtacgtttgacggttactattacgaactctggaaggatactggcaatacaacaatgacggtctacactcaaggtcgcttttcctgccagtggtcgaacatcaataacgcgttgtttaggaccgggaagaaatacaaccagaattggcagtctcttggcacaatccggatcacgtactctgcgacttacaacccaaacgggaactcctacttgtgtatctatggctggtctaccaacccattggtcgagttctacatcgttgagtcctgggggaactggagaccgcctggtgcctgcgttaccgctgacacatgggttactaccgctgaggggccaaggcaggtggaggagctgatcggcaagaagttcacggctatcgttaacggcgaggagtgggagtccagcgaggaggggttcttcgagacagacgttaagccagtgtacaccctgaagacggctgagggcttcgagctgaggctcacggctgatcaccctgtcatgaaggttgagaggatgacacggtacaaggtggagactcagtggtccaacgctggcgacctcaagccaggggataagatcattatcaacaatcatagggacttcggcaattggagcgtcaaggggaagtacaccgagggcgaggggtacctgattggcctcctgctcggcgacgggacgatcaagaagctcaacccctggatgaaggcgatttcaaagaagatggagaaggcctccgcggatttctgcgagggcatcctgagggggctcttcgacgctgatggctctgtgcaggggaatcagtcgaagggcgtctctattcgcctggcccagtcagacgtcgagatcctcaaggcggttcagcgcattctgctcaggttcggcatcttctcgaaggtgtacatgaaccgcaggggcgagcggaaggttaagatgccggatgggaagggcggggtcaaggagtacatcaccaagccccagcacgagctcgtgatcagcaacgacaatatcctctacttcgctgagagggtcggcttctcggatgccgagaagatggagaagctggagaaggctatctggaactacaagcggaagatgaatagggagaggttcgtggctagcgtcgaggaggtggtcccagacggcgttgagaaggtgtacgacgttaagattccaggcatcaatgctttcaatgctaatggcttcgtggttcacaacacgtccctgggccaagtgacaatcgatggcgggacctacgacatctataggacgacacgcgtcaaccagccttccattgtggggacagccacgttcgatcagtactggagcgtgcgcacctctaagcggacttcaggaacagtgaccgtgaccgatcacttccgcgcctgggcgaaccggggcctgaacctcggcacaatagaccaaattacattgtgcgtggagggttaccaaagctctggatcagccaacatcacccagaacaccttctctcagggctcttcttccggcagttcgggtggctcatccggctccacaacgactactcgcatcgagtgtgagaacatgtccttgtccggaccctacgttagcaggatcaccaatccctttaatggtattgcgctgtacgccaacggagacacagcccgcgctaccgttaacttccccgcaagtcgcaactacaatttccgcctgcggggttgcggcaacaacaataatcttgcccgtgtggacctgaggatcgacggacggaccgtcgggaccttttattaccagggcacatacccctgggaggccccaattgacaatgtttatgtcagtgcggggagtcatacagtcgaaatcactgttactgcggataacggcacatgggacgtgtatgccgactacctggtgatacagtgactcgagggggggcccggtacccaattcgccctatagtgagtcgtattacaattcactggccgtcgttttacaacgtcgtgactgggaaaaccctggcgttacccaacttaatcgccttgcagcacatccccctttcgccagctggcgtaatagcgaagaggcccgcaccgatcgcccttcccaacagttgcgcagcctgaatggcgaatggaaattgtaagcgttaatattttgttaaaattcgcgttaaatttttgttaaatcagctcattttttaaccaataggccgaaatcggcaaaatcccttataaatcaaaagaatagaccgagatagggttgagtgttgttccagtttggaacaagagtccactattaaagaacgtggactccaacgtcaaagggcgaaaaaccgtctatcagggcgatggcccactacgtgaaccatcaccctaatcaagttttttggggtcgaggtgccgtaaagcactaaatcggaaccctaaagggagcccccgatttagagcttgacggggaaagccggcgaacgtggcgagaaaggaagggaagaaagcgaaaggagcgggcgctagggcgctggcaagtgtagcggtcacgctgcgcgtaaccaccacacccgccgcgcttaatgcgccgctacagggcgcgtcaggtg

SEQ ID NO: 3313 - DNA, 5198 bp, Artificial Sequence
  Synthetic Construct, AT-156 intein modified protein encoding nucleic acids in pBluescript
gcacttttcggggaaatgtgcgcggaacccctatttgtttatttttctaaatacattcaaatatgtatccgctcatgagacaataaccctgataaatgcttcaataatattgaaaaaggaagagtatgagtattcaacatttccgtgtcgcccttattcccttttttgcggcattttgccttcctgtttttgctcacccagaaacgctggtgaaagtaaaagatgctgaagatcagttgggtgcacgagtgggttacatcgaactggatctcaacagcggtaagatccttgagagttttcgccccgaagaacgttttccaatgatgagcacttttaaagttctgctatgtggcgcggtattatcccgtattgacgccgggcaagagcaactcggtcgccgcatacactattctcagaatgacttggttgagtactcaccagtcacagaaaagcatcttacggatggcatgacagtaagagaattatgcagtgctgccataaccatgagtgataacactgcggccaacttacttctgacaacgatcggaggaccgaaggagctaaccgcttttttgcacaacatgggggatcatgtaactcgccttgatcgttgggaaccggagctgaatgaagccataccaaacgacgagcgtgacaccacgatgcctgtagcaatggcaacaacgttgcgcaaactattaactggcgaactacttactctagcttcccggcaacaattaatagactggatggaggcggataaagttgcaggaccacttctgcgctcggcccttccggctggctggtttattgctgataaatctggagccggtgagcgtgggtctcgcggtatcattgcagcactggggccagatggtaagccctcccgtatcgtagttatctacacgacggggagtcaggcaactatggatgaacgaaatagacagatcgctgagataggtgcctcactgattaagcattggtaactgtcagaccaagtttactcatatatactttagattgatttaaaacttcatttttaatttaaaaggatctaggtgaagatcctttttgataatctcatgaccaaaatcccttaacgtgagttttcgttccactgagcgtcagaccccgtagaaaagatcaaaggatcttcttgagatcctttttttctgcgcgtaatctgctgcttgcaaacaaaaaaaccaccgctaccagcggtggtttgtttgccggatcaagagctaccaactctttttccgaaggtaactggcttcagcagagcgcagataccaaatactgtccttctagtgtagccgtagttaggccaccacttcaagaactctgtagcaccgcctacatacctcgctctgctaatcctgttaccagtggctgctgccagtggcgataagtcgtgtcttaccgggttggactcaagacgatagttaccggataaggcgcagcggtcgggctgaacggggggttcgtgcacacagcccagcttggagcgaacgacctacaccgaactgagatacctacagcgtgagctatgagaaagcgccacgcttcccgaagggagaaaggcggacaggtatccggtaagcggcagggtcggaacaggagagcgcacgagggagcttccagggggaaacgcctggtatctttatagtcctgtcgggtttcgccacctctgacttgagcgtcgatttttgtgatgctcgtcaggggggcggagcctatggaaaaacgccagcaacgcggcctttttacggttcctggccttttgctggccttttgctcacatgttctttcctgcgttatcccctgattctgtggataaccgtattaccgcctttgagtgagctgataccgctcgccgcagccgaacgaccgagcgcagcgagtcagtgagcgaggaagcggaagagcgcccaatacgcaaaccgcctctccccgcgcgttggccgattcattaatgcagctggcacgacaggtttcccgactggaaagcgggcagtgagcgcaacgcaattaatgtgagttagctcactcattaggcaccccaggctttacactttatgcttccggctcgtatgttgtgtggaattgtgagcggataacaatttcacacaggaaacagcatatgcaaacaagcattactctgacatccaacgcatccggtacgtttgacggttactattacgaactctggaaggatactggcaatacaacaatgacggtctacactcaaggtcgcttttcctgccagtggtcgaacatcaataacgcgttgtttaggaccgggaagaaatacaaccagaattggcagtctcttggcacaatccggatcacgtactctgcgacttacaacccaaacgggaactcctacttgtgtatctatggctggtctaccaacccattggtcgagttctacatcgttgagtcctgggggaactggagaccgcctggtgcctgcttcgctaaggggactgaggtcatgatgcacgacggctctgtgaaggctattgagactatcgaggcgggggaggctgttatggggaccgacggccagccaaggaaggtggtcggcctccctcgggggagggaggtcatgtacaaggtttcccagaagacggcgcaccgggtgcataagaccgacgagacgcgcgccgctccagtcgctctcttcgagtacaactgcaatgccacacacaagctggttgtgaggactcctcggagctgccgctcgatcacccgcaagatgcagggcgttgactacaacgaggtcatcttcttcgacctcaagaagaagaagctggaggacggccgcgagatcgagattgtcaaggaggtttcgaggtcttacccagctgctgagggcgctgagaaggctgctcagatggtgaaggactactacgatgccgcgcgcgggaaggagttcttcgagtggacaatcgaggcgagggatgttagggagctcggcgctcacgtgaggaaggctactcatcaggtgtacgccccagtcctgtacgagagcgacttcttcttccattacgtgaagaactcgaagttcgctctgaggtctgaggcctcaacagctctcgcctacctcctgggcctgtgggtcggcgacgggctctccgatagggctgtgctgtccgtcgacagcgaggattccagcctcctggagcgcatcactggctacgccgacattctcgatctgagcgcggagtacaaggaccgcgagatcccgaagagggcgaagaccgtctgcctctaccccaagacgatccgcggcaacgatattcgcaggaacctgaatacggacaacccggtctggaatgccatcgttgacctcggctacctgaaggatggggttaagaatgtgccctcgtacctcttctcagactccatctgccacagggaggtgttcctcgcgggcctgattgactctgatgggcatgtccggggcgacgatgggctgtcagttacaatcaagactattcacaagaccgtcatggagggcacggtggctgtcgctaggtcgctcgggctgatcgtttctgtgaacaccgaggaggcgaagattgacaagaacgatgtgaatcaccgcttcgtctacgctatctacatttcaggcggggacgctctcctgtccgtgctcgctcattgcgctgctgcgaagaagttcagggctccaccatccaatgaggtcgttcgggggctcaagaaggtcttcttcgagatggaggagctgaaggaggacgattactacggcatcacgctcgctaaggagtcagaccatcagttcctgctcgccaatcagctcgtggttcataatacgtccctgggccaagtgacaatcgatggcgggacctacgacatctataggacgacacgcgtcaaccagccttccattgtggggacagccacgttcgatcagtactggagcgtgcgcacctctaagcggacttcaggaacagtgaccgtgaccgatcacttccgcgcctgggcgaaccggggcctgaacctcggcacaatagaccaaattacattgtgcgtggagggttaccaaagctctggatcagccaacatcacccagaacaccttctctcagggctcttcttccggcagttcgggtggctcatccggctccacaacgactactcgcatcgagtgtgagaacatgtccttgtccggaccctacgttagcaggatcaccaatccctttaatggtattgcgctgtacgccaacggagacacagcccgcgctaccgttaacttccccgcaagtcgcaactacaatttccgcctgcggggttgcggcaacaacaataatcttgcccgtgtggacctgaggatcgacggacggaccgtcgggaccttttattaccagggcacatacccctgggaggccccaattgacaatgtttatgtcagtgcggggagtcatacagtcgaaatcactgttactgcggataacggcacatgggacgtgtatgccgactacctggtgatacagtgactcgagggggggcccggtacccaattcgccctatagtgagtcgtattacaattcactggccgtcgttttacaacgtcgtgactgggaaaaccctggcgttacccaacttaatcgccttgcagcacatccccctttcgccagctggcgtaatagcgaagaggcccgcaccgatcgcccttcccaacagttgcgcagcctgaatggcgaatggaaattgtaagcgttaatattttgttaaaattcgcgttaaatttttgttaaatcagctcattttttaaccaataggccgaaatcggcaaaatcccttataaatcaaaagaatagaccgagatagggttgagtgttgttccagtttggaacaagagtccactattaaagaacgtggactccaacgtcaaagggcgaaaaaccgtctatcagggcgatggcccactacgtgaaccatcaccctaatcaagttttttggggtcgaggtgccgtaaagcactaaatcggaaccctaaagggagcccccgatttagagcttgacggggaaagccggcgaacgtggcgagaaaggaagggaagaaagcgaaaggagcgggcgctagggcgctggcaagtgtagcggtcacgctgcgcgtaaccaccacacccgccgcgcttaatgcgccgctacagggcgcgtcaggtg

SEQ ID NO: 3314 - DNA, 5180 bp, Artificial Sequence
  Synthetic Construct, AT-157 intein modified protein encoding nucleic acids in pBluescript
gcacttttcggggaaatgtgcgcggaacccctatttgtttatttttctaaatacattcaaatatgtatccgctcatgagacaataaccctgataaatgcttcaataatattgaaaaaggaagagtatgagtattcaacatttccgtgtcgcccttattcccttttttgcggcattttgccttcctgtttttgctcacccagaaacgctggtgaaagtaaaagatgctgaagatcagttgggtgcacgagtgggttacatcgaactggatctcaacagcggtaagatccttgagagttttcgccccgaagaacgttttccaatgatgagcacttttaaagttctgctatgtggcgcggtattatcccgtattgacgccgggcaagagcaactcggtcgccgcatacactattctcagaatgacttggttgagtactcaccagtcacagaaaagcatcttacggatggcatgacagtaagagaattatgcagtgctgccataaccatgagtgataacactgcggccaacttacttctgacaacgatcggaggaccgaaggagctaaccgcttttttgcacaacatgggggatcatgtaactcgccttgatcgttgggaaccggagctgaatgaagccataccaaacgacgagcgtgacaccacgatgcctgtagcaatggcaacaacgttgcgcaaactattaactggcgaactacttactctagcttcccggcaacaattaatagactggatggaggcggataaagttgcaggaccacttctgcgctcggcccttccggctggctggtttattgctgataaatctggagccggtgagcgtgggtctcgcggtatcattgcagcactggggccagatggtaagccctcccgtatcgtagttatctacacgacggggagtcaggcaactatggatgaacgaaatagacagatcgctgagataggtgcctcactgattaagcattggtaactgtcagaccaagtttactcatatatactttagattgatttaaaacttcatttttaatttaaaaggatctaggtgaagatcctttttgataatctcatgaccaaaatcccttaacgtgagttttcgttccactgagcgtcagaccccgtagaaaagatcaaaggatcttcttgagatcctttttttctgcgcgtaatctgctgcttgcaaacaaaaaaaccaccgctaccagcggtggtttgtttgccggatcaagagctaccaactctttttccgaaggtaactggcttcagcagagcgcagataccaaatactgtccttctagtgtagccgtagttaggccaccacttcaagaactctgtagcaccgcctacatacctcgctctgctaatcctgttaccagtggctgctgccagtggcgataagtcgtgtcttaccgggttggactcaagacgatagttaccggataaggcgcagcggtcgggctgaacggggggttcgtgcacacagcccagcttggagcgaacgacctacaccgaactgagatacctacagcgtgagctatgagaaagcgccacgcttcccgaagggagaaaggcggacaggtatccggtaagcggcagggtcggaacaggagagcgcacgagggagcttccagggggaaacgcctggtatctttatagtcctgtcgggtttcgccacctctgacttgagcgtcgatttttgtgatgctcgtcaggggggcggagcctatggaaaaacgccagcaacgcggcctttttacggttcctggccttttgctggccttttgctcacatgttctttcctgcgttatcccctgattctgtggataaccgtattaccgcctttgagtgagctgataccgctcgccgcagccgaacgaccgagcgcagcgagtcagtgagcgaggaagcggaagagcgcccaatacgcaaaccgcctctccccgcgcgttggccgattcattaatgcagctggcacgacaggtttcccgactggaaagcgggcagtgagcgcaacgcaattaatgtgagttagctcactcattaggcaccccaggctttacactttatgcttccggctcgtatgttgtgtggaattgtgagcggataacaatttcacacaggaaacagcatatgcaaacaagcattactctgacatccaacgcatccggtacgtttgacggttactattacgaactctggaaggatactggcaatacaacaatgacggtctacactcaaggtcgcttttcctgccagtggtcgaacatcaataacgcgttgtttaggaccgggaagaaatacaaccagaattggcagtctcttggcacaatccggatcacgtactctgcgacttacaacccaaacgggaactcctacttgtgtatctatggctggtctaccaacccattggtcgagttctacatcgttgagtcctgggggaactggagaccgcctggtgcctgcttcgccaagggcactgaggttatgatgtcggatgggtcaattaaggaggtggagggcattgaggtcgggcaggaggtcatgggcaaggacggcaagccgcgggaggtggtcggcaccccatcggggcgcgagaagatgtacaaggtctctcacaagaccgctcacagggcccataagtccgacagcacgtcggagcggttcggcctcttcgagtacacatgcaacgccactcataagctggttgtgcgcacctctaggtcatgccggccgctcgtcaggaacatccagggcacggactacgtcgaggtttgcctcttcaatatgaccaagaagacgctggaggacggccgcgtgatcgatattgtcgaggagaccagcgatttctacccagcggtggaggggcctgagaaggctctcaggatcctgaaggagtacgctgaggccgacggcgggaaggagtacttcgagtggacaattgaggctcgcgatgtggctctcctgagcgctcaggtcaggaaggctacttaccagctgtcggcccccgtgctcctggagaacaatcacttctctcattacctcaaggactccaacagcgctgttggcaatgatacagtgcgggccctgtcctacttcctcgggctgtggatcggcgacgggatgctcaacaatgccgcgacgttctcagtcgattcccagaacgcgagcctcctgaacaggattaatgagttcgccgaggtgctcggcctgtctgcggagtacaaggactcacaggagccaaagcgggccaagaccgttaacctgtacgcgaaggctatccgcgacgagggcgtgaggaagaacctcgatacgcacaatctcctgtgggacgcgatcgtcgatctcggctacctgaaggacgattcgaagaacgttcctgggtacatttgctcggactctttccagcatcgggaggtgttcctggcgggcatcattgacagcacaggctacgtgtccgatgagaccgccacggtgaagactatcgaccagtccgtcatgacaggcactgtggctgtcgctaggtccctcgggattaacgttagcgtggacgtcgaggttgacgaggatggcgtcgatcggtcattcgtttacgccatctacatggacaggtccgatgctctcctggctgtcctggctaactgcgcttccaacaataagcagatcgaggctccaccacacggcgtgattagggagttcaataaggcttacttcgagatggaggagctggaggaggacgagtactacgggctgactctctcaaatgagtcggatcatcagttcctcctcgctaatcagctcgtcgtgcataatacgtccctgggccaagtgacaatcgatggcgggacctacgacatctataggacgacacgcgtcaaccagccttccattgtggggacagccacgttcgatcagtactggagcgtgcgcacctctaagcggacttcaggaacagtgaccgtgaccgatcacttccgcgcctgggcgaaccggggcctgaacctcggcacaatagaccaaattacattgtgcgtggagggttaccaaagctctggatcagccaacatcacccagaacaccttctctcagggctcttcttccggcagttcgggtggctcatccggctccacaacgactactcgcatcgagtgtgagaacatgtccttgtccggaccctacgttagcaggatcaccaatccctttaatggtattgcgctgtacgccaacggagacacagcccgcgctaccgttaacttccccgcaagtcgcaactacaatttccgcctgcggggttgcggcaacaacaataatcttgcccgtgtggacctgaggatcgacggacggaccgtcgggaccttttattaccagggcacatacccctgggaggccccaattgacaatgtttatgtcagtgcggggagtcatacagtcgaaatcactgttactgcggataacggcacatgggacgtgtatgccgactacctggtgatacagtgactcgagggggggcccggtacccaattcgccctatagtgagtcgtattacaattcactggccgtcgttttacaacgtcgtgactgggaaaaccctggcgttacccaacttaatcgccttgcagcacatccccctttcgccagctggcgtaatagcgaagaggcccgcaccgatcgcccttcccaacagttgcgcagcctgaatggcgaatggaaattgtaagcgttaatattttgttaaaattcgcgttaaatttttgttaaatcagctcattttttaaccaataggccgaaatcggcaaaatcccttataaatcaaaagaatagaccgagatagggttgagtgttgttccagtttggaacaagagtccactattaaagaacgtggactccaacgtcaaagggcgaaaaaccgtctatcagggcgatggcccactacgtgaaccatcaccctaatcaagttttttggggtcgaggtgccgtaaagcactaaatcggaaccctaaagggagcccccgatttagagcttgacggggaaagccggcgaacgtggcgagaaaggaagggaagaaagcgaaaggagcgggcgctagggcgctggcaagtgtagcggtcacgctgcgcgtaaccaccacacccgccgcgcttaatgcgccgctacagggcgcgtcaggtg

SEQ ID NO: 3315 - protein, 819 aa, Artificial Sequence
  Synthetic Construct, AS-146-2 intein modified protein
MQTSITLTSNASGTFDGYYYELWKDTGNTTMTVYTQGRFSCQWSNINNALFRTGKKYNQNWQSLGTIRITYSATYNPNGNSYLCIYGWSTNPLVEFYIVESWGNWRPPGATSLGQVTIDGGTYDIYRTTRVNQPCFAKDTKVYYENDTLVHFESIEDMYHKYASLGREVPFDNGYAVPLETVSVYTFDPKTGEVKRTKASYIYREKVEKLAEIRLSNGYLLRITLLHPVLVFRNGLQWVPAGMIKPGDLIVGIRSVPANAATIEESEAYFLGLFVAEGTSNPLSITTGSEELKDFIVSFIEDHDGYTPTVEVRRGLYRILFHKKTAEWLGELATSNASTKVVPERVLNAGESAIAAFLAGYLDGDGYLTESIVELVTKSRELADGLVFLLKRLGITPWISQKTIEGSVYYRVYIMGEDRKTFEKVLEKSRIKPGEMNEGGVGRYPPALGKFLGKLYSEFRLPKRDNETAYHILTRSRNVWFTEKTLSRIEEYFREALEKLSEARKALEMGDKPELPFPWTAITKYGFTDRQVANYRTRGLPKRPELKEKVVSALLKEIERLEGVAKLALETIELARRLEFHEVSSVEVVDYNDWVYDLVIPETHNFIAPNGLVLHNSIVGTATFDQYWSVRTSKRTSGTVTVTDHFRAWANRGLNLGTIDQITLCVEGYQSSGSANITQNTFSQGSSSGSSGGSSGSTTTTRIECENMSLSGPYVSRITNPFNGIALYANGDTARATVNFPASRNYNFRLRGCGNNNNLARVDLRIDGRTVGTFYYQGTYPWEAPIDNVYVSAGSHTVEITVTADNGTWDVYADYLVIQ

SEQ ID NO: 3316 - protein, 819 aa, Artificial Sequence
  Synthetic Construct, AS-146-4 intein modified protein
MQTSITLTSNASGTFDGYYYELWKDTGNTTMTVYTQGRFSCQWSNINNALFRTGKKYNQNWQSLGTIRITYSATYNPNGNSYLCIYGWSTNPLVEFYIVESWGNWRPPGATSLGQVTIDGGTYDIYRTTRVNQPCFAKDTKVYYENDTLVHFESIEDMYHKYASLGREVPFDNGYAVPLETVSVYTFEPKTGEVKRTKASYIYREKVEKLAEIRLSNGYLLRITLLHPVLVFRNGLQWVPAGMINPGDLIVGIRSVPANAATIEESEAYFLGLFVAEGTSNPLSITTGSEELKDFIVSFIEDHDGYTPTVEVRRGLYRILFRKKTAEWLGELATSNASTKVVPERVLNAGESAIAAFLAGYLDGDGYLTESIVELVTKSRELADGLVFLLKRLGIAPRISQKTIEGSVYYRIYITGEDRKTFEKVLEKSRIKPGEMNEGGVGRYPPALGKFLGKLYSEFRLPKRDNETAYHILTRSRNVWFTEKTLSRIEEYFREALEKLSEAGKALEMGDKPELPFPWTAITKYGFTDRQVANYRTRGLPKRPELKEKVVSALLKEIERLEGVANLALETIELARRLEFHEVSSVEVVDYNDWVYDLVIPETHNFIAPNGLVLHNSIVGTATFDQYWSVRTSKRTSGTVTVTDHFRAWANRGLNLGTIDQITLCVEGYQSSGSANITQNTFSQGSSSGSSGGSSGSTTTTRIECENMSLSGPYVSRITNPFNGIALYANGDTARATVNFPASRNYNFRLRGCGNNNNLARVDLRIDGRTVGTFYYQGTYPWEAPIDNVYVSAGSHTVEITVTADNGTWDVYADYLVIQ

SEQ ID NO: 3317 - protein, 819 aa, Artificial Sequence
  Synthetic Construct, AS-146-5 intein modified protein
MQTSITLTSNASGTFDGYYYELWKDTGNTTMTVYTQGRFSCQWSNINNALFRTGKKYNQNWQSLGTIRITYSATYNPNGNSYLCIYGWSTNPLVEFYIVESWGNWRPPGATSLGQVTIDGGTYDIYRTTRVNQPCFAKDTKVYYENDTLVHFESIEDMYHKYASLGREVPFDNGYAVPLETVSVYTFDPKTGEVKRTKASYIYREKVEKLAEIRLSNGYLLRITLLHPVLVFRNGLQWVPAGMIMPGDLIVGIRSVPANAATIEESEAYFLGLFVAEGTSNPLSITTGSEELKDFIVSFIEDHDGYTPTVEVRRGLYRILFRKKTAEWLGELATSNASTKVVPERVLNAGESAIAAFLAGYLDGDGYLTESIVELVTKSRELADGLVFLLKRLGITPRISQKTIEGSVYYRIYITGEVRKTFEKVLEKSRIKPGEMNEGGVGRYPPALGKFLGKLYSEFRLPKRDNETAYHILTRSRNVWFTEKTLSRIEEYFREALEKLSEARKALEMGDKPELPFPWTAITKYGFTDRQVANYRTRGLPKRPELKEKVVSALLKEIERLEGVAKLALETIELARRLEFHEVSIVEVVDYNDWVYDLVIPETHNFIAPNGLVLHNSIVGTATFDQYWSVRTSKRTSGTVTVTDHFRAWANRGLNLGTIDQITLCVEGYQSSGSANITQNTFSQGSSSGSSGGSSGSTTTTRIECENMSLSGPYVSRITNPFNGIALYANGDTARATVNFPASRNYNFRLRGCGNNNNLARVDLRIDGRTVGTFYYQGTYPWEAPIDNVYVSAGSHTVEITVTADNGTWDVYADYLVIQ

SEQ ID NO: 3318 - protein, 819 aa, Artificial Sequence
  Synthetic Construct, AS-146-9 intein modified protein
MQTSITLTSNASGTFDGYYYELWKDTGNTTMTVYTQGRFSCQWSNINNALFRTGKKYNQNWQSLGTIRITYSATYNPNGNSYLCIYGWSTNPLVEFYIVESWGNWRPPGATSLGQVTIDGGTYDIYRTTRVNQPCFAKDTKVYYENDTLVHFESIEDMYHKYASLGREVPFDNGYAVPLETVSVYTFDPKTGEVKRTKASYIYREKVEKLAEIRLSNGYLLRITLLHPVLLFRNGLQWVPAGMIKPGDLIVGIRSVPANAATIEESEAYFLGLFVAEGTSNSLSITTGSEELKDFIVSFIEDHDGYTPTVEVRRGLYRILFRKKTAEWLGELATSNASTKVVPERVLNAGESAIAAFLAGYLDGDGYLTESIVELVTKSRELADGLVFLLKRLGITPRISQMTIEGSVYYRIYITGEDRKTFEKVLEKSRIKPGEMNEGGVGRYPPALGKFLGKLYSEFRLPKRDNETAYHILTRSRNVWFTEKTLSRIEEYFREALEKLSEARKALEMGDKPELPFPWTAITKYGFTDRQVANYRTRGLPKRPDLKEKVVSALLKEIERLEGVAKLALETIELARRLEFHEVSSVEVVDYNDWVYDLVIPETHNFIAPNGLVLHNSNVGTATFDQYWSVRTSKRTSGTVTVTDHFRAWANRGLNLGTIDQITLCVEGYQSSGSANITQNTFSQGSSSGSSGGSSGSTTTTRIECENMSLSGPYVSRITNPFNGIALYANGDTARATVNFPASRNYNFRLRGCGNNNNLARVDLRIDGRTVGTFYYQGTYPWEAPIDNVYVSAGSHTVEITVTADNGTWDVYADYLVIQ

SEQ ID NO: 3319 - protein, 819 aa, Artificial Sequence
  Synthetic Construct, AS-146-11 intein modified protein
MQTSITLTSNASGTFDGYYYELWKDTGNTTMTVYTQGRFSCQWSNINNALFRTGKKYNQNWQSLGTIRITYSATYNPNGNSYLCIYGWSTNPLVEFYIVESWGNWRPPGATSLGQVTIDGGTYDIYRTTRVNQSCFAKDTKVYYENDTLVHFESIEDMYHKYASLGREVPFDNGYAVPLETVSVYTFDPKTGEVKRTKASYIYREKVEKLAEIRLSNGYLLRITLLHPVLVFRNGLQWVPAGMIKPGDLIVGIRSVPANAATIEESEAYFLGLFVAEGTSNPLSITTGSEELKDFIVSFIEDHDGYTPTVEVRRGLYRILFRKKTAEWLGELATSNASTKVVPERVLNAGESAIAAFLAGYLDGDGYLTESIVELVTKSRELADGLVFLLKRLGITPRISQKTIKGSVYYRIYITGEDRKTFEKVLEKSRIKPGEMNEGGVGRYPPALGKFLGKLYSEFRLPKRDNETAYHILTRSRNVWFTEKTLSRIEEYFREALEKLSEARKALEMGDKPELPFPWTAITKYGFTDRQVANYRTRGLPKRPELKEKVVSALLKEIERLEGVAKLALETIELARRLEFHEVSSVEVVDYNDWVYDLVIPETHNFIAPNGLVLHNSIVGTATFDQYWSVRTSKRTSGTVTVTDHFRAWANRGLNLGTIDQITLCVEGYQSSGSANITQNTFSQGSSSGSSGGSSGSTTTTRIECENMSLSGPYVSRITNPFNGIALYANGDTARATVNFPASRNYYFRLRGCGNNNNLARVDLRIDGRTVGTFYYQGTYPWEAPIDNVYVSAGSHTVEITVTADNGTWDVYADYLVIQ

SEQ ID NO: 3320 - protein, 819 aa, Artificial Sequence
  Synthetic Construct, AS-146-12 intein modified protein
MQTSITLTSNASGTFDGYYYELWKDTGNTTMTVYTQGRFSCQWSNINNALFRTGKKYNQNWQSLGTIRITYSATYNPNGNSYLCIYGWSTNPLVEFYIVESWGNWRPPGATSLGQVTIDGGTYDIYRTTRVNQSCFAKDTKVYYENDTLVHFESIEDMYHKYASLGREVPFDNGYAVPLETVSVYTFDPKTGEVKRTKASYIYREKVEKLAEIRLSNGYLLRITLLHPVLVFRNGLQWVPAGMIKPGDLIVGIRSVPANAATIEESEAYFLGLFVAEGTSNPLSITTGSEELKDFIVSFIEDHDGYTPTVEVRRGLYRILFRKKTAEWLGELATSNASTKVVPEMVLNAGESAIAAFLAGYLDGDGYLTESIVELVTKSRELADGLVFLLKRLGITPRISQKTIEGSVYYRIYITGEDRKTFEKVLEKSRIKPGEMNEGGVGRYPPALGKFLGKLYSEFRLPKRDNETAYHILTRSRNVWFTEKTLSRIEEYFREALEKLSEARKALEMGDKPELPFPWTAITKYGFTDRQVANYRTRGLPKRPELKEKVVSALLKEIERLEGVAKLALETIELARRLEFHEVSSVEVDDYNDWVYDLVIPETHNFIAPNGLVLHNSIVGTATFDQYWSVRTSKRTSGTVTVTDHFRAWANRGLNLGTIDQITLCVEGYQSSGSANITQNTFSQGSSSGSSGGSSGSTTTTRIECENMSLSGPYVSRITNPFNGIALYANGDTARATVNFPASRNYNFRLRGCGNNNNLARVDLRIDGRTVGTFYYQGTYPWEAPIDNVYVSAGSHTVEITVTADNGTWDVYADYLVIQ

SEQ ID NO: 3321 - protein, 819 aa, Artificial Sequence
  Synthetic Construct, AS-146-13 intein modified protein
MQTSITLTSNASGTFDGYYYELWKDTGNTIMTVYTQGRFSCQWSNINNALFRTGKKYNQNWQSLGTIRITYSATYNPNGNSYLCIYGWSTNPLVEFYIVESWGNWRPPGATSLGQVTIDGGTYDIYRTTRVNQPCFAKDTKVYYENDTLVHFESIEDMYHKYASLGREVPFDNGYAVPLETVSVYTFDPKTGEVKRTKASYIYREKVEKLAEIRLSNGYLLRITLLHPVLVFRNGLQWVPAGMIKPGDLIVGIRSVPANAATIEESEAYFLGLFVAEGTSNPLSITTGSEELKDFIVSFIEDHDGYTPTVEVRRGLYRILFRKKTAEWLGGLATSNASTKVVPERVLNAGESAIAAFLAGYLDGDEYLTESIVELVTKSRELADGLVFLLKRLGITPRISQKTIEGSVYYRIYITGEDRKTFEKVLEKSRIKPGEMNEGGVGRYPPALGKFLGKLYSEFRLPKRDNETAYHILTRSRNVWFTEKTLSRIEEYFREALEKLSEARKALEMGDKPELPFPWTAITKYGFTDRQVANYRTRGLPKRPELKEKVVSALLKEIERLEGVAKLALETIELARRMEFHEVSSVEVVDYNDWVYDLVIPETHNFIAPNGLVLHNSTVGTATFDQYWSVRTSKRTSGTVTVTDHFRAWANRGLNLGTIDQITLCVEGYQSSGSANITQNTFSQGSSSGSSGGSSGSTTTTRIECENMSLSGPYVSRITNPFNGIALYANGDTARATVNFPASRNYNFRLRGCGNNNNLARVDLRIDGRTVGTFYYQGTYPWEAPIDNVYVSAGSHTVEITVTADNGTWDVYADYLVIQ

SEQ ID NO: 3322 - protein, 819 aa, Artificial Sequence
  Synthetic Construct, AS-146-16 intein modified protein
MQTSITLTSNASGTFDGYYYELWKDTGNTTMTVYTQGRFSCQWSNINNALFRTGKKYNQNWQSLGTIRITYSATYNPNGNSYLCIYGWSTNPLVEFYIVESWGNWRPPGATSLGQVTIDGGTYDIYRTTRVNQPCFAKDTKVYYENDTLVHFESIEDMYHKYASLGREVPFDNGYAVPLETVSVYTFDLKTGEVKRTKASYIYREKVEKLAEIRLSNGYLLRITLLHPVLVFRNGLQWVPAAMIKPGDLIVGIRSVPANAATIEESEAYFLGLFVAEGTSNPLSITTGSEELKDFIVSFIEDHDGYTPTVEVRRGLYRILFRKKTAEWLGELATSNASTKVVPERVLNAGESAIAAFLAGYLDGDGYLTESIVELVTKSRELADGLVFLLKRLGITPRISQKTIEGSVYYRIYITGEDRKTFEKVLEKSRIKPGEMNEGGVGRYPPALGKFLGKLYSEFRLPKRDNETAYHILTRSRNVWFTEKTLSRIEEYFREALEKLSEARKALEMGDKPELPFPWTAITKYGFTDRQVANYRTRGLPKRPELKEKVVSALLKEIERLEGVAKLALETIELARRLEFHEVSSVEVVDYNDWVYDLVIPETHNFIAPNGLVLHNSIVGTATFDQYWSVRTSKRTSGTVTVTDHFRAWANRGLNLGTIDQITLCVEGYQSSGSANITQNTFSQGSSSGSSGGSSGSTTTTRIECENMSLSGPYVSRITNPFNGIALYADGDTARATVNFPASRNYNFRLRGCGNNNNLARVDLRIDGRTVGTFYYQGTYPWEAPIDNVYVSAGSHTVEITVTADNGTWDVYADYLVIQ

SEQ ID NO: 3323 - DNA, 2460 bp, Artificial Sequence
  Synthetic Construct, AS-146-2 intein modified protein encoding nucleic acids
atgcaaacaagcattactctgacatccaacgcatccggtacgtttgacggttactattacgagctctggaaggatactggcaatacaacaatgacggtctacactcaaggtcgcttttcctgccagtggtcgaacatcaataacgcgttgtttaggaccgggaagaaatacaaccagaattggcagtctcttggcacaatccggatcacgtactctgcgacttacaacccaaacgggaactcctacttgtgtatctatggctggtctaccaacccattggtcgagttctacatcgttgagtcctgggggaactggagaccgcctggtgccacgtccctgggccaagtgacaatcgatggcgggacctacgacatctataggacgacacgcgtcaaccagccttgcttcgctaaggacactaaggtctactacgagaatgacacactggttcatttcgagtcaattgaggacatgtaccataagtacgcttctctcgggagggaggtgccattcgacaacggctacgctgtcccactggagaccgtgtcagtctacacgttcgatccgaagacaggcgaggttaagaggacgaaggctagctacatctaccgggagaaggtggagaagctcgccgagatccgcctgtcgaacggctacctcctgaggattacactcctgcaccccgttctcgtgttccggaatggcctgcagtgggtgccagctggcatgatcaagcctggggacctcatcgtcggcattcgctcggttccagcgaacgccgcgactattgaggagtctgaggcctacttcctcgggctgttcgtggctgagggcacctcaaatcctctctccatcaccacgggctccgaggagctgaaggacttcatcgtcagcttcattgaggaccatgatgggtacacaccaactgtcgaggttcgcaggggcctctaccggatcctgttccacaagaagacggctgagtggctcggcgagctggctacttcgaacgcctctaccaaggtggtccctgagagggtcctcaatgcgggggagtccgctatcgctgccttcctcgctggctacctggacggcgatgggtacctcactgagtctattgtggagctggtcaccaagtcacgggagctcgctgacgggctggtgttcctcctgaagcgcctgggcatcacgccgtggattagccagaagacaatcgaggggtcggtctactaccgggtctacattatgggcgaggatcgcaagacattcgagaaggtcctggagaagtccaggatcaagccaggggagatgaacgagggcggggttggcaggtacccaccagctctgggcaagttcctcgggaagctgtacagcgagttcaggctccccaagcgggacaacgagactgcgtaccacatcctgaccaggtcacggaatgtgtggttcaccgagaagacgctctcccggattgaggagtacttcagggaggctctggagaagctgtcggaggctaggaaggctctggagatgggcgacaagccggagctgccattcccttggacagcgatcactaagtacgggttcacggatcgccaggtcgctaactacaggacaaggggcctcccaaagaggccagagctgaaggagaaggttgtgtccgccctcctgaaggagatcgagaggctggagggcgtggctaagctcgctctggagaccattgagctcgctaggcgcctggagttccatgaggtttccagcgtggaggtcgttgactacaatgattgggtctacgatctcgtcattccagagactcataacttcattgctccaaatgggctcgtgctccacaactccattgtggggacagccacgttcgatcagtactggagcgtgcgcacctctaagcggacttcaggaacagtgaccgtgaccgatcacttccgcgcctgggcgaaccggggcctgaacctcggcacaatagaccaaattacattgtgcgtggagggttaccaaagctctggatcagccaacatcacccagaacaccttctctcagggctcttcttccggcagttcgggtggctcatccggctccacaacgactactcgcatcgagtgtgagaacatgtccttgtccggaccctacgttagcaggatcaccaatccctttaatggtattgcgctgtatgccaacggagacacagcccgcgctaccgttaacttccccgcaagtcgcaactacaatttccgcctgcggggttgcggcaacaacaataatcttgcccgtgtggacctgaggatcgacggacggaccgtcgggaccttttattaccagggcacatacccctgggaggccccaattgacaatgtttatgtcagtgcggggagtcatacagtcgaaatcactgttactgcggataacggcacatgggacgtgtatgccgactacctggtgatacagtga

SEQ ID NO: 3324 - DNA, 2460 bp, Artificial Sequence
  Synthetic Construct, AS-146-4 intein modified protein encoding nucleic acids
atgcaaacaagcattactctgacatccaacgcatccggtacgtttgacggttactattacgaactctggaaggatactggcaatacaacaatgacggtctacactcaaggtcgcttttcctgccagtggtcgaacatcaataacgcgttgtttaggaccgggaagaaatacaaccagaattggcagtctcttggcacaatccggatcacgtactctgcgacttacaacccaaacgggaactcctacttgtgtatctatggctggtctaccaacccattggtcgagttctacatcgttgagtcctgggggaactggagaccgcctggtgccacgtccctgggccaagtgacaatcgatggcgggacctacgacatctataggacgacacgcgtcaaccagccttgcttcgctaaggacactaaggtctactacgagaatgacacactggttcatttcgagtcaattgaggacatgtaccataagtacgcttctctcgggagggaggtgccattcgacaacggctacgctgtcccactggagaccgtgtcagtctacacgttcgaaccgaagacaggcgaggttaagaggacgaaggctagctacatctaccgggagaaggtggagaagctcgccgagatccgcctgtcgaacggctacctcctgaggattacactcctgcaccccgttctcgtgttccggaatggcctgcagtgggtgccagctggcatgatcaatcctggggacctcatcgtcggcattcgctcggttccagcgaacgccgcgactattgaggagtctgaggcctacttcctcgggctgttcgtggctgagggcacctcaaatcctctctccatcaccacgggctccgaggagctgaaggacttcatcgtcagcttcattgaggaccatgatgggtacacaccaactgtcgaggttcgcaggggcctctaccggatcctgttccgcaagaagacggctgagtggctcggcgagctggctacttcgaacgcctctaccaaggtggtccctgagagggtcctcaatgcgggggagtccgctatcgctgccttcctcgctggctacctggacggcgatgggtacctcactgagtctattgtggagctggtcaccaagtcacgggagctcgctgacgggctggtgttcctcctgaagcgcctgggcatcgcgccgaggattagccagaagacaatcgaggggtcggtctactaccggatctacattacgggcgaggatcgcaagacattcgagaaggtcctggagaagtccaggatcaagccaggggagatgaacgagggcggggttggcaggtacccaccagctctgggcaagttcctcgggaagctgtacagcgagttcaggctccccaagcgggacaacgagactgcgtaccacatcctgaccaggtcacggaatgtgtggttcaccgagaagacgctctcccggattgaggagtacttcagggaggctctggagaagctgtcggaggctgggaaggctctggagatgggcgacaagccggagctgccattcccttggacagcgatcactaagtacgggttcacggatcgccaggtcgctaactacaggacaaggggcctcccaaagaggccagagctgaaggagaaggttgtgtccgccctcctgaaggagatcgagaggctggagggcgtggctaacctcgctctggagaccattgagctcgctaggcgcctggagttccatgaggtttccagcgtggaggtcgttgactacaatgattgggtctacgatctcgtcattccagagactcataacttcattgctccaaatgggctcgtgctccacaactccattgtggggacagccacgttcgatcagtactggagcgtgcgcacctctaagcggacttcaggaacagtgaccgtgaccgatcacttccgcgcctgggcgaaccggggcctgaacctcggcacaatagaccaaattacattgtgcgtggagggttaccaaagctctggatcagccaacatcacccagaacaccttctctcagggctcttcttccggcagttcgggtggctcatccggctccacaacgactactcgcatcgagtgtgagaacatgtccttgtccggaccctacgttagcaggatcaccaatccctttaatggtattgcgctgtacgccaacggagacacagcccgcgctaccgttaacttccccgcaagtcgcaactacaatttccgcctgcggggttgcggcaacaacaataatcttgcccgtgtggacctgaggatcgacggacggaccgtcgggaccttttattaccagggcacatacccctgggaggccccaattgacaatgtttatgtcagtgcggggagtcatacagtcgaaatcactgttactgcggataacggcacatgggacgtgtatgccgactacctggtgatacagtga

SEQ ID NO: 3325 - DNA, 2460 bp, Artificial Sequence
  Synthetic Construct, AS-146-5 intein modified protein encoding nucleic acids
atgcaaacaagcattactctgacatccaacgcatccggtacgtttgacggttactattacgaactctggaaggatactggcaatacaacaatgacggtctacactcaaggtcgcttttcctgccagtggtcgaacatcaataacgcgttgtttaggaccgggaagaaatacaaccagaattggcagtctcttggcacaatccggatcacgtactctgcgacttacaacccaaacgggaactcctacttgtgtatctatggctggtctaccaacccattggtcgagttctacatcgttgagtcctgggggaactggagaccgcctggtgccacgtccctgggccaagtgacaatcgatggcgggacctacgacatctataggacgacacgcgtcaaccagccttgcttcgctaaggacactaaggtctactacgagaatgacacactggttcatttcgagtcaattgaggacatgtaccataagtacgcttctctcgggagggaggtgccattcgacaacggctacgctgtcccactggagaccgtgtcagtctacacgttcgatccgaagacaggcgaggttaagaggacgaaggctagctacatctaccgggagaaggtggagaagctcgccgagatccgcctgtcgaacggctacctcctgaggattacactcctgcaccccgttctcgtgttccggaatggcctgcagtgggtaccagctggcatgatcatgcctggggacctcatcgtcggcattcgctcggttccagcgaacgccgcgactattgaggagtctgaggcctacttcctcgggctgttcgtggctgagggcacctcaaatcctctctccatcaccacgggctccgaggagctgaaggacttcatcgtcagcttcattgaggaccatgatgggtacacaccaactgtcgaggttcgcaggggcctctaccggatcctgttccgcaagaagacggctgagtggctcggcgagctggctacttcgaacgcctctaccaaggtggtccctgagagggtcctcaatgcgggggagtccgctatcgctgccttcctcgctggctacctggacggcgatgggtacctcactgagtctattgtggagctggtcaccaagtcacgggagctcgctgacgggctggtgttcctcctgaagcgcctgggcatcacgccgaggattagccagaagacaatcgaggggtcggtctactaccggatctacattacgggcgaggttcgcaagacattcgagaaggtcctggagaagtccaggatcaagccaggggagatgaacgagggcggggttggcaggtacccaccagctctgggcaagttcctcgggaagctgtacagcgagttcaggctccccaagcgggacaacgagactgcgtaccacatcctgaccaggtcacggaatgtgtggttcaccgagaagacgctctcccggattgaggagtacttcagggaggctctggagaagctgtcggaggctaggaaggctctggagatgggcgacaagccggagctgccattcccttggacagcgatcactaagtacgggttcacggatcgccaggtcgctaactacaggacaaggggcctcccaaagaggccagagctgaaggagaaggttgtgtccgccctcctgaaggagatcgagaggctggagggcgtggctaagctcgctctggagaccattgagctcgctaggcgcctggagttccatgaggtttccatcgtggaggtcgttgactacaatgattgggtctacgatctcgtcattccagagactcataacttcattgctccaaatgggctcgtgctccacaactccattgtggggacagccacgttcgatcagtactggagcgtgcgcacctctaagcggacttcaggaacagtgaccgtgaccgatcacttccgcgcctgggcgaaccggggcctgaacctcggcacaatagaccaaattacattgtgcgtggagggttaccaaagctctggatcagccaacatcacccagaacaccttctctcagggctcttcttccggaagttcgggtggctcatccggctccacaacgactactcgcatcgagtgtgagaacatgtccttgtccggaccctacgttagcaggatcaccaatccctttaatggtattgcgctgtacgccaacggagacacagcccgcgctaccgttaacttccccgcaagtcgcaactacaatttccgcctgcggggttgcggcaacaacaataatcttgcccgtgtggacctgaggatcgacggacggaccgtcgggaccttttattaccagggcacatacccctgggaggccccaattgacaatgtttatgtcagtgcggggagtcatacagtcgaaatcactgttactgcggataacggcacatgggacgtgtatgccgactacctggtgatacagtga

SEQ ID NO: 3326 - DNA, 2460 bp, Artificial Sequence
  Synthetic Construct, AS-146-9 intein modified protein encoding nucleic acids
atgcaaacaagcattactctgacatccaacgcatccggtacgtttgacggttactattacgaactctggaaggatactggcaatacaacaatgacggtctacactcaaggtcgcttttcctgccagtggtcgaacatcaataacgcgttgtttaggaccgggaagaaatacaaccagaattggcagtctcttggtacaatccggatcacgtactctgcgacttacaacccaaacgggaactcctacttgtgtatctatggctggtctaccaacccattggtcgagttctatatcgttgagtcctgggggaactggagaccgcctggtgccacgtccctgggccaagtgacaatcgatggcgggacctacgacatctataggacgacacgcgtcaaccagccttgcttcgctaaggacactaaggtctactacgagaatgacacactggttcatttcgagtcaattgaggatatgtaccataagtacgcttctctcgggagggaggtgccattcgacaacggctacgctgtcccactggagaccgtgtcagtctacacgttcgatccgaagacaggcgaggttaagaggacgaaggctagctacatctaccgggagaaggtggagaagctcgccgagatccgcctgtcgaacggctacctcctgaggattacactcctgcaccccgttctcctgttccggaatggcctgcagtgggtgccagctggcatgatcaagcctggggacctcatcgtcggcattcgctcggttccagcgaacgccgcgactattgaggagtctgaggcctacttcctcgggctgttcgtggctgagggcacctcaaattctctctccatcaccacgggctccgaggagctgaaggacttcatcgtcagcttcattgaggaccatgatgggtacacaccaactgtcgaggttcgcaggggcctctaccggatcctgttccgcaagaagacggctgagtggctcggcgagctggctacttcgaacgcctctaccaaggtggtccctgagagggtcctcaatgcgggggagtccgctatcgctgccttcctcgctggctacctggacggcgatgggtacctcactgagtctattgtggagctggtcaccaagtcacgggagctcgctgacgggctggtgttcctcctgaagcgcctgggcatcacgccgaggattagccagatgacaatcgaggggtcggtctactaccggatctacattacgggcgaggatcgcaagacattcgagaaggtcctggagaagtccaggatcaagccaggggagatgaacgagggcggggttggcaggtacccaccagctctgggcaagttcctcgggaagctgtacagcgagttcaggctccccaagcgggacaacgagactgcgtaccacatcctgaccaggtcacggaatgtgtggttcaccgagaagacgctctcccggattgaggagtacttcagggaggctctggagaagctgtcggaggctaggaaggctctggagatgggcgacaagccggagctgccattcccttggacagcgatcactaagtacgggttcacggatcgccaggtcgctaactacaggacaaggggcctcccaaagaggccagacctgaaggagaaggttgtgtccgccctcctgaaggagatcgagaggctggagggcgtggctaagctcgctctggagaccattgagctcgctaggcgcctggagttccatgaggtttccagcgtggaggtcgttgactacaatgattgggtctacgatctcgtcattccagagactcataacttcattgctccaaatgggctcgtgctccacaactccaatgtggggacagccacgttcgatcagtactggagcgtgcgcacctctaagcggacttcaggaacagtgaccgtgaccgatcacttccgcgcctgggcgaaccggggcctgaacctcggcacaatagaccaaattacattgtgcgtggagggttaccaaagctctggatcagccaacatcacccagaacaccttctctcagggctcttcttccggcagttcgggtggctcatccggctccacaacgactactcgcatcgagtgtgagaacatgtccttgtccggaccctacgttagcaggatcaccaatccctttaatggtattgcgctgtacgccaacggagacacagcccgcgctaccgttaacttccccgcaagtcgcaactacaatttccgcctgcggggttgcggcaacaacaataatcttgcccgtgtggacctgaggatcgacggacggaccgtcgggaccttttattaccagggcacatacccctgggaggccccaattgacaatgtttatgtcagtgcggggagtcatacagtcgaaatcactgttactgcggataacggcacatgggacgtgtatgccgactacctggtgatacagtga

SEQ ID NO: 3327 - DNA, 2460 bp, Artificial Sequence
  Synthetic Construct, AS-146-11 intein modified protein encoding nucleic acids
atgcaaacaagcattactctgacatccaacgcatccggtacgtttgacggttactattacgaactctggaaggatactggcaatacaacaatgacggtctacactcaaggtcgcttttcctgccagtggtcgaacatcaataacgcgttgtttaggaccgggaagaaatacaaccagaattggcagtctcttggcacaatccggatcacgtactctgcgacttacaacccaaacgggaactcctacttgtgtatctatggctggtctaccaacccattggtcgagttctacatcgttgagtcctgggggaactggagaccgcctggtgccacgtccctgggccaagtgacaatcgatggcgggacctacgacatctataggacgacacgcgtcaaccagtcttgcttcgctaaggacactaaggtctactacgagaatgacacactggttcatttcgagtcaattgaggacatgtaccataagtacgcttctctcgggagggaggtgccattcgacaacggctacgctgtcccactggagaccgtgtcagtctacacgttcgatccgaagacaggcgaggttaagaggacgaaggctagctacatctaccgggagaaggtggagaagctcgccgagatccgcctgtcgaacggctacctcctgaggattacactcctgcaccccgttctcgtgttccggaatggcctgcagtgggtgccagctggcatgatcaagcctggggacctcatcgtcggcattcgctcggttccagcgaacgccgcgactattgaggagtctgaggcctacttcctcgggctgttcgtggctgagggcacctcaaatcctctctccatcaccacgggctccgaggagctgaaggacttcatcgtcagcttcattgaggaccatgatgggtacacaccaactgtcgaggttcgcaggggcctctaccggatcctgttccgcaagaagacggctgagtggctcggcgagctggctacttcgaacgcctctaccaaggtggtccctgagagggtcctcaatgcgggggagtccgctatcgctgccttcctcgctggctacctggacggcgatgggtacctcactgagtctattgtggagctggtcaccaagtcacgggagctcgctgacgggctggtgttcctcctgaagcgcctgggcatcacgccgaggattagccagaagacaatcaaggggtcggtctactaccggatctacattacgggcgaggatcgcaagacattcgagaaggtcctggagaagtccaggatcaagccaggggagatgaacgagggcggggttggcaggtacccaccagctctgggcaagttcctcgggaagctgtacagcgagttcaggctccccaagcgggacaacgagactgcgtaccacatcctgaccaggtcacggaatgtgtggttcaccgagaagacgctctcccggattgaggagtacttcagggaggctctggagaagctgtcggaggctaggaaggctctggagatgggcgacaagccggagctgccattcccttggacagcgatcactaagtacgggttcacggatcgccaggtcgctaactacaggacaaggggcctcccaaagaggccagagctgaaggagaaggttgtgtccgccctcctgaaggagatcgagaggctggagggcgtggctaagctcgctctggagaccattgagctcgctaggcgcctggagttccatgaggtttccagcgtggaggtcgttgactacaatgattgggtctacgatctcgtcattccagagactcataacttcattgctccaaatgggctcgtgctccacaactccattgtggggacagccacgttcgatcagtactggagcgtgcgcacctctaagcggacttcaggaacagtgaccgtgaccgatcacttccgcgcctgggcgaaccggggcctgaacctcggcacaatagaccaaattacattgtgcgtggagggttaccaaagctctggatcagccaacatcacccagaacaccttctctcagggctcttcttccggcagttcgggtggctcatccggctccacaacgactactcgcatcgagtgtgagaacatgtccttgtccggaccctacgttagcaggatcaccaatccctttaatggtattgcgctgtacgccaacggagacacagcccgcgctaccgttaacttccccgcaagtcgcaactactatttccgcctgcggggttgcggcaacaacaataatcttgcccgtgtggacctgaggatcgacggacggaccgtcgggaccttttattaccagggcacatacccctgggaggccccaattgacaatgtttatgtcagtgcggggagtcatacagtcgaaatcactgttactgcggataacggcacatgggacgtgtatgccgactacctggtgatacagtga

SEQ ID NO: 3328 - DNA, 2460 bp, Artificial Sequence
  Synthetic Construct, AS-146-12 intein modified protein encoding nucleic acids
atgcaaacaagcattactctgacatccaacgcatccggtacgtttgacggttactattacgaactctggaaggatactggcaatacaacaatgacggtctacactcaaggtcgcttttcctgccagtggtcgaacatcaataacgcgttgtttaggaccgggaagaaatacaaccagaattggcagtctcttggcacaatccggatcacgtactctgcgacttacaacccaaacgggaactcctacttgtgtatctatggctggtctaccaacccattggtcgagttctacatcgttgagtcctgggggaactggagaccgcctggtgccacgtccctgggccaagtgacaatcgatggcgggacctacgacatctataggacgacacgcgtcaaccagtcttgcttcgctaaggacactaaggtctactacgagaatgacacactggttcatttcgagtcaattgaggacatgtaccataagtacgcttctctcgggagggaggtgccattcgacaacggctacgctgtcccactggagaccgtgtcagtctacacgttcgatccgaagacaggcgaggttaagaggacgaaggctagctacatctaccgggaaaaggtggagaagctcgccgagatccgcctgtcgaacggctacctcctgaggattacactcctgcaccccgttctcgtgttccggaatggcctgcagtgggtgccagctggcatgatcaagcctggggacctcatcgtcggcattcgctcggttccagcgaacgccgcgactattgaggagtctgaggcctacttcctcgggctgttcgtggctgagggcacctcaaatcctctctccatcaccacgggctccgaggagctgaaggacttcatcgtcagcttcattgaggaccatgatgggtacacaccaactgtcgaggttcgcaggggcctctaccggatcctgttccgcaagaagacggctgagtggctcggcgagctggctacttcgaacgcctctaccaaggtggtccctgagatggtcctcaatgcgggggagtccgctatcgctgccttcctcgctggctacctggacggcgatgggtacctcactgagtctattgtggagctggtcaccaagtcacgggagctcgctgacgggctggtgttcctcctgaagcgcctgggcatcacgccgaggattagccagaagacaatcgaggggtcggtctactaccgaatctacattacgggcgaggatcgcaagacattcgagaaagtcctggagaagtccaggatcaagccaggggagatgaacgagggcggggttggcaggtacccaccagctctgggcaagttcctcgggaagctgtacagcgagttcaggctccccaagcgggacaacgagactgcgtaccacatcctgaccaggtcacggaatgtgtggttcaccgagaagacgctctcccggattgaggagtacttcagggaggctctggagaagctgtcggaggctaggaaggctctggagatgggcgacaagccggagctgccattcccttggacagcgatcactaagtacgggttcacggatcgccaggtcgctaactacaggacaaggggcctcccaaagaggccagagctgaaggagaaggttgtgtccgccctcctgaaggagatcgagaggctggagggcgtggctaagctcgctctggagaccattgagctcgctaggcgcctggagttccatgaggtttccagcgtggaggtcgatgactacaatgattgggtctacgatctcgtcattccagagacacataacttcattgctccaaatgggctcgtgctccacaactccattgtggggacagccacgttcgatcagtactggagcgtgcgcacctctaagcggacttcaggaacagtgaccgtgaccgatcacttccgcgcctgggcgaaccggggcctgaacctcggcacaatagaccaaattacattgtgcgtggagggttaccaaagctctggatcagccaacatcacccagaacaccttctctcagggctcttcttccggcagttcgggtggctcatccggctccacaacgactactcgcatcgagtgtgagaacatgtccttgtccggaccctacgttagcaggatcaccaatccctttaatggtattgcgctgtacgccaacggagacacagcccgcgctaccgttaacttccccgcaagtcgcaactacaatttccgcctgcggggttgcggcaacaacaataatcttgcccgtgtggacctgaggatcgacggacggaccgtcgggaccttttattaccagggcacatacccctgggaggccccaattgacaatgtttatgtcagtgcggggagtcatacagtcgaaatcactgttactgcggataacggcacatgggacgtgtatgccgactacctggtgatacagtga

SEQ ID NO: 3329 - DNA, 2460 bp, Artificial Sequence
  Synthetic Construct, AS-146-13 intein modified protein encoding nucleic acids
atgcaaacaagcattactctgacatccaacgcatccggtacgtttgacggttactattacgaactctggaaggatactggcaatacaataatgacggtctacactcaaggtcgcttttcctgccagtggtcgaacatcaataacgcgttgtttaggaccgggaagaaatacaaccagaattggcagtctcttggcacaatccggatcacgtactctgcgacttacaacccaaacgggaactcctacttgtgtatctatggctggtctaccaacccattggtcgagttctacatcgttgagtcctgggggaactggagaccgcctggtgccacgtccctgggccaagtgacaatcgatggcgggacctacgacatctataggacgacacgcgtcaaccagccttgcttcgctaaggacactaaggtctactacgagaatgacacactggttcatttcgagtcaattgaggacatgtaccataagtacgcttctctcgggagggaggtgccattcgacaacggctacgctgtcccactggagaccgtgtcagtctacacgttcgatccgaagacaggcgaggttaagaggacgaaggctagctacatctaccgggagaaggtggagaagctcgccgagatccgcctgtcgaacggctacctcctgaggattacactcctgcaccccgttctcgtgttccggaatggcctgcagtgggtgccagctggcatgatcaagcctggggacctcatcgtcggcattcgctcggttccagcgaacgccgcgactattgaggagtctgaggcctacttcctcgggctgttcgtggctgagggcacctcaaatcctctctccatcaccacgggctccgaggagctgaaggacttcatcgtcagcttcattgaggaccatgatgggtacacaccaactgtcgaggttcgcaggggcctctaccggatcctgttccgcaagaagacggctgagtggctcggcgggctggctacttcgaacgcctctaccaaggtggtccctgagagggtcctcaatgcgggggagtccgctatcgctgccttcctcgctggctacctggacggcgatgagtacctcactgagtctattgtggagctggtcaccaagtcacgggagctcgctgacgggctggtgttcctcctgaagcgcctgggcatcacgccgaggattagccagaagacaatcgaggggtcggtctactaccggatctacattacgggcgaggatcgcaagacattcgagaaggtcctggagaagtccaggatcaagccaggggagatgaacgagggcggggttggcaggtacccaccagctctgggcaagttcctcgggaagctgtacagcgagttcaggctccccaagcgggataacgagactgcgtaccacatcctgaccaggtcacggaatgtgtggttcaccgagaagacgctctcccggattgaggagtacttcagggaggctctggagaagctgtcggaggctaggaaggctctggagatgggcgacaagccggagctgccattcccttggacagcgatcactaagtacgggttcacggatcgccaggtcgctaactacaggacaaggggcctcccaaagaggccagagctgaaggagaaggttgtgtccgccctcctgaaggagatcgagaggctggagggcgtggctaagctcgctctggagaccattgagctcgctaggcgcatggagttccatgaggtttccagcgtggaggtcgttgactacaatgattgggtctacgatctcgtcattccagagactcataacttcattgctccaaatgggctcgtgctccacaactccactgtggggacagccacgttcgatcagtactggagcgtgcgcacctctaagcggacatcaggaacagtgaccgtgaccgatcacttccgcgcctgggcgaaccggggcctgaacctcggcacaatagaccaaattacattgtgcgtggagggttaccaaagctctggatcagccaacatcacccagaacaccttctctcagggctcttcttccggcagttcgggtggctcatccggctccacaacgactactcgcatcgagtgtgagaacatgtccttgtccggaccctacgttagcaggatcaccaatccctttaatggtattgcgctgtacgccaacggagacacagcccgcgctaccgttaacttccccgcaagtcgcaactacaatttccgcctgcggggttgcggcaacaacaataatcttgcccgtgtggacctgaggatcgacggacggaccgtcgggaccttctattaccagggcacatacccctgggaggccccaattgacaatgtttatgtcagtgcagggagtcatacagtcgaaatcactgttactgcggataacggcacatgggacgtgtatgccgactacctggtgatacagtga

SEQ ID NO: 3330 - DNA, 2460 bp, Artificial Sequence
  Synthetic Construct, AS-146-16 intein modified protein encoding nucleic acids
atgcaaacaagcattactctgacatccaacgcatccggtacgtttgacggttactattacgaactctggaaggatactggcaatacaacaatgacggtctacactcaaggtcgcttttcctgccagtggtcgaacatcaataacgcgttgtttaggaccgggaagaaatacaaccagaattggcagtctcttggcacaatccggatcacgtactctgcgacttacaacccaaacgggaactcctacttgtgtatctatggctggtctaccaacccattggtcgagttctacatcgtagagtcctgggggaactggagaccgcctggtgccacgtccctgggccaagtgacaatcgatggcgggacctacgacatctataggacgacacgcgtcaaccagccttgcttcgctaaggacactaaggtctactacgagaatgacacactggttcatttcgagtcaattgaggacatgtaccataagtacgcttctctcgggagggaggtgccattcgacaacggctacgctgtcccactggagaccgtgtcagtctacacgttcgatctgaagacaggcgaggttaagaggacgaaggctagctacatctaccgggagaaggtggagaagctcgccgagatccgcctgtcgaacggctacctcctgaggattacactcctgcaccccgttctcgtgttccggaatggcctgcagtgggtgccagctgccatgatcaagcctggggacctcatcgtcggcattcgctcggttccagcgaacgccgcgactattgaggagtctgaggcctacttcctcgggctgttcgtggctgagggcacctcaaatcctctctccatcaccacgggctccgaggagctgaaggacttcatcgtcagcttcattgaggaccatgatgggtacacaccaactgtcgaggttcgcaggggcctctaccggatcctgttccgcaagaagacggctgagtggctcggcgagctggctacttcgaacgcctctaccaaggtggtccctgagagggtcctcaatgcgggggagtccgctatcgctgccttcctcgctggctacctggacggcgatgggtacctcactgagtctattgtggagctggtcaccaagtcacgggagctcgctgacgggctggtgttcctcctgaagcgcctgggcatcacgccgaggattagccagaagacaatcgaggggtcggtctactaccggatctacattacgggcgaggatcgcaagacattcgagaaggtcctggagaagtccaggatcaagccaggggagatgaacgagggcggggttggcaggtacccaccagctctgggcaagttcctcgggaagctgtacagcgagttcaggctccccaagcgggacaacgagactgcgtaccacatcctgaccaggtcacggaatgtgtggttcaccgagaagacgctctcccggattgaggagtacttcagggaggctctggagaagctgtcggaggctaggaaggctctggagatgggcgacaagccggagctgccattcccttggacagcgatcactaagtacgggttcacggatcgccaggtcgctaactacaggacaaggggcctcccaaagaggccagagctgaaggagaaggttgtgtccgccctcctgaaggagatcgagaggctggagggcgtggctaagctcgctctggagaccattgagctcgctaggcgcctggagttccatgaggtttccagcgtggaggtcgttgactacaatgattgggtctacgatctcgtcattccagagactcataacttcattgctccaaatgggctcgtgctccacaactccattgtggggacagccacgttcgatcagtactggagcgtgcgcacctctaagcggacttcaggaacagtgaccgtgaccgatcacttccgcgcctgggcgaaccggggcctgaacctcggcacaatagaccaaattacattgtgcgtggagggttaccaaagctctggatcagccaacatcacccagaacaccttctctcagggctcttcttccggcagttcgggtggctcatccggctccacaacgactactcgcatcgagtgtgaaaacatgtccttgtccggaccctacgttagcaggatcaccaatccctttaatggtattgcgctgtacgccgacggagacacagcccgcgctaccgttaacttccccgcaagtcgcaactacaatttccgcctgcggggttgcggcaacaacaataatcttgcccgtgtggacctgaggatcgacggacggaccgtcgggaccttttattaccagggcacatacccctgggaggccccaattgacaatgtttatgtcagtgcggggagtcatacagtcgaaatcactgttactgcggataacggcacatgggacgtgtatgccgactacctggtgatacagtga
